(19) United States
(12) Patent Application Publication
(10) Pub. No.: US 2018/0127786 A1
(43) Pub. Date: May 10, 2018

(54) COMPOSITIONS AND METHODS FOR GENE EDITING

(71) Applicant: CASEBIA THERAPEUTICS LIMITED LIABILITY PARTNERSHIP, San Francisco, CA (US)

(72) Inventors: Axel Bouchon, Leverkusen (DE); Ante S. Lundberg, Cambridge, MA (US); Lawrence Klein, Cambridge, MA (US); Peter G. Nell, San Francisco, CA (US); Basha Stankovich, Alameda, CA (US)

(21) Appl. No.: 15/715,068

(22) Filed: Sep. 25, 2017

Related U.S. Application Data
(60) Provisional application No. 62/398,555, filed on Sep. 23, 2016.

(51) Int. Cl. C12N 15/90; C12N 15/11; C12N 9/22

(52) U.S. Cl. CPC C12N 15/907; C12N 15/11; A61K 48/00; C12N 2800/80; C12N 9/22

(57) ABSTRACT

Provided include materials and methods for treating a subject with one or more conditions associated with WAS gene whether ex vivo or in vivo. Also provided include materials and methods for editing and/or modulating the expression of WAS gene in a cell by genome editing.

### CROSS-REFERENCES TO RELATED APPLICATIONS

[0001] This application claims the benefit of U.S. Provisional Application No. 62/398,555, filed Sep. 23, 2016, which is incorporated herein by reference in entirety and for all purposes.

### REFERENCE TO A SEQUENCE LISTING SUBMITTED AS AN ASCII FILE

[0002] The present application is being filed along with a Sequence Listing in electronic format. The Sequence Listing file, entitled SEQ_LIST.txt, was created on Sep. 21, 2017, and is 9.58 Mega Bytes in size. The information in electronic format of the Sequence Listing is incorporated herein by reference in its entirety.

### FIELD

[0003] The disclosures provided herewith relates to the field of gene editing and specifically to the alteration of the WAS gene.

### BACKGROUND

[0004] Genome engineering refers to the strategies and techniques for the targeted, specific modification of the genetic information (genome) of living organisms. Genome engineering is a very active field of research because of the wide range of possible applications, particularly in the areas of human health; the correction of a gene carrying a harmful mutation, for example, or to explore the function of a gene. Early technologies developed to insert a transgene into a living cell were often limited by the random nature of the insertion of the new sequence into the genome. Random insertions into the genome may result in disrupting normal regulation of neighboring genes leading to severe unwanted effects. Furthermore, random integration technologies offer little reproducibility, as there is no guarantee that the sequence would be inserted at the same place in two different cells. Recent genome engineering strategies, such as ZFNs, TALENs, HEs and MegaTALs, enable a specific area of the DNA to be modified, thereby increasing the precision of the correction or insertion compared to early technologies. These newer platforms offer a much larger degree of reproducibility, but still have their limitations.

[0005] Despite efforts from researchers and medical professionals worldwide who have been trying to address genetic disorders, and despite the promise of genome engineering approaches, there still remains a critical need for developing safe and effective treatments involving WAS gene related indications.

[0006] By using genome engineering tools to create permanent changes to the genome that can address the WAS gene related disorders or conditions with a single treatment, the resulting therapy may completely remedy certain WAS gene related indications and/or diseases.

### SUMMARY OF THE INVENTION

[0007] Provided herein are cellular, ex vivo and in vivo methods for creating permanent changes to the genome by inserting or deleting one or more nucleotides from a gene or genes in the genome, e.g., in WAS gene. In other cases, WAS gene may be defective such that replacing all or a part of WAS gene would be therapeutic. Such methods are also contemplated herein. The methods are useful for correcting, eliminating or modulating the expression or function of one or more gene products encoded at, within, or near the WAS gene (neighboring genes) or other DNA sequences that encode regulatory elements of the WAS gene. Also provided herein are components, kits, and compositions for performing such methods. Also provided are cells produced by such methods which may be useful in treating any WAS gene related disorder or disorder of a gene in the genomic neighborhood (upstream or downstream) of WAS gene.

[0008] Accordingly, provided here is a method of editing a genome in a cell. The method can have inserting a nucleic acid sequence of a Wiskott-Aldrich syndrome gene (WAS gene) or functional derivative thereof into a genomic sequence of the cell, wherein the cell has one or more mutation(s) in the genome which results in reduction of the expression of endogenous WAS gene as compared to the expression in a normal cell that does not have such mutation(s).

[0009] In embodiments, the method can further have providing the following to the cell: (a) a deoxyribonucleic acid (DNA) endonuclease or an oligonucleotide encoding said DNA endonuclease and (b) a targeting oligonucleotide having a first region of at least 15 bases complementary to the genomic sequence. In some embodiments, the WAS gene or functional derivative thereof is inserted using a donor template having the nucleic acid sequence of the WAS gene or functional derivative thereof.

[0010] In embodiments, the DNA endonuclease is an enzyme selected from the group consisting of any of those in Table 1, Table 2, and variants having at least 70% homology to any of those listed in Table 1 or Table 2.

[0011] In embodiments, the DNA endonuclease is Cas 9.

[0012] In embodiments, the oligonucleotide encoding the DNA endonuclease is codon optimized.

[0013] In embodiments, the oligonucleotide encoding said DNA endonuclease is a deoxyribonucleic acid (DNA) sequence.

[0014] In embodiments, the oligonucleotide encoding the DNA endonuclease is a ribonucleic acid (RNA) sequence.

[0015] In embodiments, the RNA sequence encoding the DNA endonuclease is linked to the targeting oligonucleotide via a covalent bond.

[0016] In embodiments, the targeting oligonucleotide is a guide RNA (gRNA).

[0017] In embodiments, the first region of the gRNA is selected from those listed in Table 4 and variants thereof having at least 85% homology to any of those listed in Table 4.

[0018] In embodiments, the genomic sequence is at, within, or near the WAS gene or WAS gene regulatory elements.

[0019] In embodiments, the genomic sequence is in an intergenic region that is upstream of the promoter of the endogenous WAS gene in the genome.

[0020] In embodiments, the intergenic region is at least 500 bp upstream of the first exon of the endogenous WAS gene in the genome.

[0021] In embodiments, the inserting is at, within, or near a safe harbor locus or a safe harbor site.

[0022] In embodiments, the safe-harbor locus is selected from the group consisting of albumin gene, AAVS 1 gene, HRPT gene, CCR5 gene, globin gene, TTR gene. TF gene, F9 gene, Alb gene, Gys2 gene and PCSK9 gene.

[0023] In embodiments, the safe harbor site is selected from the group consisting of the following regions: AAVS1 19q13.4-qter, HRPT 1q31.2, CCR5 3p21.31, Globin 11p15.4, TTR 18q12.1, TF 3q22.1, F9 Xq27.1, Alb 4q13.3, Gys2 12p12.1, and PCSK9 1p32.3.

[0024] In embodiments, the genomic sequence is at, within, or near the AAVS1 gene.

[0025] In embodiments, the genomic sequence is in an intergenic region that is upstream of the promoter of the AAVS1 gene in the genome.

[0026] In embodiments, the intergenic region is at least 2.5 kb upstream of the first exon of the AAVS1 gene in the genome.

[0027] In embodiments, the intergenic region is about 2.5 kb to about 5 kb upstream of the first exon of the AAVS1 gene in the genome.

[0028] In embodiments, one or more of the foregoing-mentioned oligonucleotides are encoded in an Adeno Associated Virus (AAV) vector.

[0029] In embodiments, the DNA endonuclease and/or one or more of the foregoing-mentioned oligonucleotide are formulated in a liposome or lipid nanoparticle.

[0030] In embodiments, the DNA endonuclease is formulated in a liposome or lipid nanoparticle.

[0031] In embodiments, the liposome or lipid nanoparticle further has the targeting oligonucleotide.

[0032] In embodiments, one or more of the foregoing-mentioned (a), (b) and (c) are provided to the cell via electroporation.

[0033] In embodiments, one or more of the foregoing-mentioned (a), (b) and (c) are provided to the cell via chemical transfection.

[0034] In embodiments, the DNA endonuclease is precomplexed with the targeting oligonucleotide, forming a Ribonucleoprotein (RNP) complex, prior to the provision to the cell.

[0035] In embodiments, the RNP is provided to the cell via electroporation.

[0036] In embodiments, the foregoing-mentioned one or more mutation(s) are present at, within, or near the endogenous WAS gene in the genome.

[0037] In embodiments, the expression of endogenous WAS gene in the cell is about 10% about 20%, about 30%, about 40%, about 50%, about 60%, about 70%, about 80%, about 90% or about 100% reduced as compared to the expression of endogenous WAS gene expression in the normal cell.

[0038] In embodiments, the expression of the introduced WAS gene or functional derivative thereof in the cell is at least about 10%, about 20%, about 30%, about 40%, about 50%, about 60%, about 70%, about 80%, about 90%, about 100%, about 200%, about 300%, about 400%, about 500%, about 600%, about 700%, about 800%, about 900%, about 1,000%, about 2,000%, about 3,000%, about 5,000%, about 10,000% or more as compared to the expression of endogenous WAS gene of the cell.

[0039] In embodiments, the expression of the introduced WAS gene or functional derivative thereof in the cell is at least about 2 folds, about 3 folds, about 4 folds, about 5 folds, about 6 folds, about 7 folds, about 8 folds, about 9 folds, about 10 folds, about 15 folds, about 20 folds, about 30 folds, about 50 folds, about 100 folds or more of the expression of endogenous WAS gene of the cell.

[0040] In embodiments, the cell is a stem cell.

[0041] In embodiments, the stem cell is a CD34⁺ hematopoietic stem and progenitor cell (HSPC).

[0042] Also provided herein is a method of treating a subject for a Wiskott-Aldrich syndrome (WAS) gene related condition or disorder. The method has providing a genetically modified cell to the subject, wherein a genome of the genetically modified cell is edited such that an exogenous nucleic acid sequence of a WAS gene or functional derivative thereof is inserted in the genome.

[0043] In embodiments, the subject is a patient having or is suspected of having Wiskott-Aldrich syndrome (WAS).

[0044] In embodiments, the subject is diagnosed with a risk of the Wiskott-Aldrich syndrome (WAS) gene related condition or disorder.

[0045] In embodiments, the genetically modified cell is autologous.

[0046] In embodiments, the autologous cell has one or more mutation(s) in the genome which results in reduction of the expression of endogenous WAS gene as compared to the expression of endogenous WAS gene in a normal cell that does not have such mutation(s).

[0047] In embodiments, the foregoing-mentioned one or more mutation(s) are present at, within, or near the endogenous WAS gene in the genome.

[0048] In embodiments, the expression of endogenous WAS gene in the genetically modified cell is about 10%, about 20%, about 30%, about 40%, about 50%, about 60%, about 70%, about 80%, about 90% or about 100% reduced as compared to the expression of endogenous WAS gene expression in a normal cell that does not have such mutation(s).

[0049] In embodiments, the expression of the introduced WAS gene or functional derivative thereof in the genetically modified cell is at least about 10%, about 20%, about 30%, about 40%, about 50%, about 60%, about 70%, about 80%, about 90%, about 100%, about 200%, about 300%, about 400%, about 500%, about 600%, about 700%, about 800%, about 900%, about 1,000%, about 2,000%, about 3,000%, about 5,000%, about 10,000% or more as compared to the expression of endogenous WAS gene of the genetically modified cell.

[0050] In embodiments, the expression of the introduced WAS gene or functional derivative thereof in the genetically modified cell is at least about 2 folds, about 3 folds, about 4 folds, about 5 folds, about 6 folds, about 7 folds, about 8 folds, about 9 folds, about 10 folds, about 15 folds, about 20 folds, about 30 folds, about 50 folds, about 100 folds or more of the expression of endogenous WAS gene of the genetically modified cell.

[0051] In embodiments, the cell is a stem cell.

[0052] In embodiments, the stem cell is a CD34⁺ hematopoietic stem and progenitor cell (HSPC).

[0053] In embodiments, the method further has obtaining a biological sample from the subject, wherein the biological sample has a CD34⁺ cell, and editing the genome of at least one cell by inserting the exogenous nucleic acid sequence of a WAS gene or functional derivative thereof into a genomic sequence of the cell, thereby producing the genetically modified cell.

[0054] In embodiments, the exogenous nucleic acid sequence is inserted at, within, or near the WAS gene or WAS gene regulatory elements.

[0055] In embodiments, the genomic sequence is in an intergenic region that is upstream of the promoter of the endogenous WAS gene in the genome.

[0056] In embodiments, the intergenic region is at least 500 bp upstream of the first exon of the endogenous WAS gene in the genome.

[0057] In embodiments, the exogenous nucleic acid sequence is inserted at, within, or near a safe harbor locus or a safe harbor site.

[0058] In embodiments, the safe-harbor locus is selected from the group consisting of albumin gene, AAVS1 gene, HRPT gene, CCR5 gene, globin gene, TTR gene, TF gene, F9 gene, Alb gene, Gys2 gene and PCSK9 gene.

[0059] In embodiments, the safe harbor site is selected from the group consisting of the following regions: AAVS1 19q13.4-qter, HRPT 1q31.2, CCR5 3p21.31, Globin 11p15.4, TTR 18q12.1, TF 3q22.1, F9 Xq27.1, Alb 4q13.3, Gys2 12p12.1, and PCSK9 1p32.3.

[0060] In embodiments, the exogenous nucleic acid sequence is inserted at, within, or near the AAVS1 gene.

[0061] In embodiments, the genomic sequence is in an intergenic region that is upstream of the promoter of the AAVS1 gene in the genome.

[0062] In embodiments, the intergenic region is at least 2.5 kb upstream of the first exon of the AAVS1 gene in the genome.

[0063] In embodiments, the intergenic region is about 2.5 kb to about 5 kb upstream of the first exon of the AAVS1 gene in the genome.

[0064] Also provided herein is a composition having a guide RNA (gRNA) sequence having a sequence selected from those listed in Table 4 and/or variants thereof having at least 85% homology to any of those listed in Table 4.

[0065] In embodiments, the composition further has a DNA endonuclease or an oligonucleotide encoding said DNA endonuclease.

[0066] In embodiments, the composition further has a donor template having a nucleic acid sequence of a WAS gene or functional derivative thereof.

[0067] In embodiments, the DNA endonuclease is an enzyme selected from the group consisting of any of those in Table 1, Table 2, and variants having at least 70% homology to any of those listed in Table 1 or Table 2.

[0068] In embodiments, the DNA endonuclease is Cas 9.

[0069] In embodiments, the oligonucleotide encoding the DNA endonuclease is codon optimized.

[0070] In embodiments, the oligonucleotide encoding said DNA endonuclease is a deoxyribonucleic acid (DNA) sequence.

[0071] In embodiments, the oligonucleotide encoding the DNA endonuclease is a ribonucleic acid (RNA) sequence.

[0072] In embodiments, the RNA sequence encoding said DNA endonuclease is linked to the gRNA via a covalent bond.

[0073] In embodiments, the composition further has a liposome or lipid nanoparticle.

[0074] In embodiments, the DNA endonuclease is precomplexed with the gRNA, forming a Ribonucleoprotein (RNP) complex.

[0075] Also provided herein is a composition having a guide RNA (gRNA) sequence that has a spacer sequence complementary to (i) a genomic sequence at, within, or near Wiskott-Aldrich syndrome (WAS) gene or (ii) a genomic sequence at, within, or near a safe harbor locus or a safe harbor site.

[0076] In embodiments, the safe harbor locus is selected from the group consisting of albumin gene, AAVS1 gene, HRPT gene, CCR5 gene, globin gene, TTR gene, TF gene, F9 gene, Alb gene, Gys2 gene and PCSK9 gene.

[0077] In embodiments, the safe harbor site is selected from the group consisting of the following regions: AAVS1 19q13.4-qter. HRPT 1q31.2, CCR5 3p21.31, Globin 11p15.4, TTR 18q12.1, TF 3q22.1, F9 Xq27.1, Alb 4q13.3, Gys2 12p12.1, and PCSK9 1p32.3.

[0078] In embodiments, the spacer sequence is 15 bases to 20 bases in length.

[0079] In embodiments, the complementarity between the spacer sequence to the genomic sequence is at least 80%, at least 85%, at least 90%, at least 95%, at least 96%, at least 97%, at least 98%, at least 99% or at least 100%.

[0080] In embodiments, the composition further has one or more of the following: a deoxyribonucleic acid (DNA) endonuclease or an oligonucleotide encoding the DNA endonuclease and a donor template having a nucleic acid sequence of a WAS gene or functional derivative thereof.

[0081] In embodiments, the DNA endonuclease is an enzyme selected from the group consisting of any of those in Table 1, Table 2, and variants having at least 70% homology to any of those listed in Table 1 or Table 2.

[0082] In embodiments, the DNA endonuclease is Cas 9.

[0083] In embodiments, the oligonucleotide encoding said DNA endonuclease is codon optimized.

[0084] In embodiments, the oligonucleotide encoding said DNA endonuclease is a ribonucleic acid (RNA) sequence.

[0085] In embodiments, the RNA sequence encoding the DNA endonuclease is linked to the gRNA via a covalent bond.

[0086] In embodiments, the composition further has a liposome or lipid nanoparticle.

[0087] In embodiments, the DNA endonuclease is precomplexed with the gRNA, forming a Ribonucleoprotein (RNP) complex.

[0088] Also provided herein is a kit having any of the foregoing-mentioned composition and further having instructions for use.

[0089] Also provided herein is a method for editing a Wiskott-Aldrich syndrome gene (WAS gene) in a human cell by genome editing comprising the step of introducing into the human cell one or more deoxyribonucleic acid (DNA) endonucleases to effect one or more single-strand breaks (SSBs) or double-strand breaks (DSBs) within or near the WAS gene or WAS gene regulatory elements that results in a permanent insertion or deletion of at least one nucleotide thereby affecting the expression or function of WAS gene products.

[0090] Also provided herein is a method of altering the contiguous genomic sequence of WAS gene in a cell, tissue or organism comprising contacting said contiguous WAS gene genomic sequence with: (a) an enzyme selected from the group consisting of any of those in Table 1, Table 2, and variants having at least 70% homology to any of those listed in Table 1 or Table 2, (b) at least one targeting oligonucleotide (sgRNA or gRNA) capable of hybridizing to said genomic sequence and (c) optionally a donor oligonucleotide.

[0091] In some embodiments, one or more targeting oligonucleotide (sgRNA or gRNA) independently comprises a first region of at least 15 linked nucleosides complementary to the genomic sequence and a second region of between 5 and 15 linked nucleosides operably connected to said first region via a covalent bond or hybridization forces.

[0092] Also provided herein is an ex vivo method for treating a patient have a WAS gene related condition or disorder comprising the steps of: i) creating a patient specific induced pluripotent stem cell (iPSC), ii) editing within or near an a Wiskott-Aldrich syndrome gene (WAS gene) or other DNA sequences that encode regulatory elements of the WAS gene of the iPSC; iii) differentiating the genome-edited iPSC into a selected cell type, and iv) implanting the cell type into the patient.

[0093] In some embodiments, the editing step comprises introducing into the iPSC one or more deoxyribonucleic acid (DNA) endonucleases to effect one or more single-strand breaks (SSBs) or double-strand breaks (DSBs) and is selected from any of those in Table 1, Table 2, and variants having at least 70% homology to any of those listed in Table 1 or Table 2.

[0094] Also provided herein is an ex vivo method for treating a patient with Wiskott-Aldrich Syndrome (WAS) comprising the steps of: i) isolating a mesenchymal stem cell from the patient, ii) editing within or near a Wiskott-Aldrich syndrome gene (WAS gene) or other DNA sequences that encode regulatory elements of the WAS gene of the mesenchymal stem cell, iii) differentiating the genome-edited mesenchymal stem cell into a differentiated cell, and iv) implanting the differentiated cell into the patient.

[0095] Also provided herein is an in vivo method for treating a patient with a WAS gene related disorder comprising the step of editing the Wiskott-Aldrich syndrome gene (WAS gene) in a cell of the patient.

[0096] In some embodiments, the editing step comprises introducing into the cell one or more deoxyribonucleic acid (DNA) endonucleases to effect one or more single-strand breaks (SSBs) or double-strand breaks (DSBs) selected from any of those in Table 1, Table 2, and variants having at least 70% homology to any of those listed in Table 1 or Table 2.

[0097] Also provided herein is a method of altering the contiguous genomic sequence of WAS gene in a cell comprising contacting said cell with a gene editing nuclease, wherein said nuclease is encoded as a chemically modified mRNA.

[0098] In some embodiments, the modified mRNA is chemically modified in the coding region.

[0099] In some embodiments, the gene editing nuclease is selected from any of those in Table 1. Table 2, and variants having at least 70% homology to any of those listed in Table 1 or Table 2.

[0100] In some embodiments, the chemically modified mRNA is codon optimized.

[0101] In some embodiments, the gene editing nuclease is formulated in a liposome or lipid nanoparticle.

[0102] In some embodiments, the gene editing nuclease is formulated in a lipid nanoparticle which also comprises one or more gRNAs or one or more sgRNAs.

[0103] In some embodiments, the method further comprises introducing into the cell a donor template comprising at least a portion of the wild-type WAS gene.

[0104] In some embodiments, the at least a portion of the wild-type WAS gene comprises one or more sequences selected from the group consisting of a WAS gene exon, a WAS gene intron, a sequence comprising an exon:intron junction of WAS gene.

[0105] In some embodiments, the method further has introducing into the cell a donor template comprising at least a portion of a wild-type neighboring gene of WAS gene.

[0106] In some embodiments, the donor template is either a single or double stranded polynucleotide.

[0107] In some embodiments, the method further has introducing one or more gRNAs or one or more sgRNAs.

[0108] In some embodiments, one or more gRNAs or one or more sgRNAs are chemically modified.

[0109] In some embodiments, one or more gRNAs or one or more sgRNAs is precomplexed with the gene editing nuclease.

[0110] In some embodiments, the pre-complexing involves a covalent attachment of said one or more gRNAs or one or more sgRNAs to said gene editing complex.

[0111] In some embodiments, the alteration of the contiguous genomic sequence occurs 5′, 3′ or at the site of one or more SNPs of WAS gene.

[0112] In some embodiments, the gene editing enzyme is encoded in an AAV vector particle, where the AAV vector serotype is selected from the group consisting of AAV1, AAV10, AAV106.1/hu.37, AAV11, AAV114.3/hu.40, AAV12, AAV127.2/hu.41, AAV127.5/hu.42, AAV128.1/hu.43, AAV128.3/hu.44, AAV130.4/hu.48, AAV145.1/hu.53, AAV145.5/hu.54, AAV145.6/hu.55, AAV16.12/hu.11, AAV16.3, AAV16.8/hu.10, AAV161.10/hu.60, AAV161.6/hu.61, AAV1-7/rh.48, AAV1-8/rh.49, AAV2, AAV2.5T, AAV2-15/rh.62, AAV223.1, AAV223.2, AAV223.4, AAV223.5, AAV223.6, AAV223.7, AAV2-3/rh.61, AAV24.1, AAV2-4/rh.50, AAV2-5/rh.51, AAV27.3, AAV29.3.bb.1, AAV29.5/bb.2, AAV2G9, AAV-2-pre-miRNA-101, AAV3, AAV3.1/hu.6, AAV3.1/hu.9, AAV3-11/rh.53, AAV3-3, AAV33.12/hu.17, AAV33.4/hu.15, AAV33.8/hu.16, AAV3-9/rh.52, AAV3a, AAV3b, AAV4, AAV4-19/rh.55, AAV42.12, AAV42-10, AAV42-11, AAV42-12, AAV42-13, AAV42-15, AAV42-1b, AAV42-2, AAV42-3a, AAV42-3b, AAV42-4, AAV42-5a, AAV42-5b, AAV42-6b, AAV42-8, AAV42-aa, AAV43-1, AAV43-12, AAV43-20, AAV43-21, AAV43-23, AAV43-25, AAV43-5, AAV4-4, AAV44.1, AAV44.2, AAV44.5, AAV46.2/hu.28, AAV46.6/hu.29, AAV4-8/r11.64, AAV4-8/rh.64, AAV4-9/rh.54, AAV5, AAV52.1/hu.20, AAV52/hu.19, AAV5-22/rh.58, AAV5-3/rh.57, AAV54.1/hu.21, AAV54.2/hu.22, AAV54.4R/hu.27, AAV54.5/hu.23, AAV54.7/hu.24, AAV58.2/hu.25, AAV6, AAV6.1, AAV6.1.2, AAV6.2, AAV7, AAV7.2, AAV7.3/hu.7, AAV8, AAV-8b, AAV-8h, AAV9, AAV9.11, AAV9.13, AAV9.16, AAV9.24, AAV9.45, AAV9.47, AAV9.61, AAV9.68, AAV9.84, AAV9.9, AAVA3.3, AAVA3.4, AAVA3.5, AAVA3.7, AAV-b, AAVC1, AAVC2, AAVC5, AAVCh.5, AAVCh.5R1, AAVcy.2. AAVcy.3, AAVcy.4, AAVcy.5, AAVCy.5R1, AAVCy.5R2, AAVCy.5R3, AAVCy.5R4, AAVcy.6, AAV-DJ, AAV-DJ8, AAVF3, AAVF5, AAV-h, AAVH-1/hu.1, AAVH2, AAVH-5/hu.3, AAVH6, AAVhE1.1, AAVhER1.14, AAVhEr1.16, AAVhEr1.18, AAVhER1.23, AAVhEr1.35, AAVhEr1.36, AAVhEr1.5, AAVhEr1.7, AAVhEr1.8, AAVhEr2.16, AAVhEr2.29, AAVhEr2.30, AAVhEr2.31, AAVhEr2.36, AAVhEr2.4, AAVhEr3.1, AAVhu.1. AAVhu.10, AAVhu.11, AAVhu.11, AAVhu.12, AAVhu.13, AAVhu.14/9, AAVhu.15, AAVhu.16, AAVhu.17, AAVhu.18, AAVhu.19, AAVhu.2, AAVhu.20, AAVhu.21, AAVhu.22. AAVhu.23.2, AAVhu.24, AAVhu.25, AAVhu.27, AAVhu.28, AAVhu.29, AAVhu.29R, AAVhu.3, AAVhu.31, AAVhu.32, AAVhu.34, AAVhu.35, AAVhu.37, AAVhu.39, AAVhu.4, AAVhu.40, AAVhu.41, AAVhu.42, AAVhu.43, AAVhu.44, AAVhu.44R1, AAVhu.44R2, AAVhu.44R3, AAVhu.45, AAVhu.46, AAVhu.47, AAVhu.48, AAVhu.48R1, AAVhu.48R2, AAVhu.48R3, AAVhu.49, AAVhu.5, AAVhu.51, AAVhu.52, AAVhu.53, AAVhu.54, AAVhu.55, AAVhu.56, AAVhu.57, AAVhu.58, AAVhu.6, AAVhu.60, AAVhu.61, AAVhu.63. AAVhu.64, AAVhu.66, AAVhu.67, AAVhu.7, AAVhu.8, AAVhu.9, AAVhu.t19, AAVLG-10/rh.40, AAVLG-4/rh.38, AAVLG-9/hu.39, AAVLG-9/hu.39, AAV-LK01, AAV-LK02. AAVLK03, AAV-LK03, AAV-LK04, AAV-LK05, AAV-LK06, AAV-LK07, AAV-LK08, AAV-LK09, AAV-LK10, AAV-LK11, AAV-LK12, AAV-LK13, AAV-LK14, AAV-LK15, AAV-LK17, AAV-LK18, AAV-LK19, AAVN721-8/rh.43, AAV-PAEC, AAV-PAEC11, AAV-PAEC 12, AAV-PAEC2, AAV-PAEC4, AAV-PAEC6, AAV-PAEC7, AAV-PAEC8, AAVpi.1, AAVpi.2, AAVpi.3, AAVrh.10, AAVrh.12, AAVrh.13, AAVrh.13R, AAVrh.14, AAVrh.17, AAVrh.18, AAVrh.19, AAVrh.2, AAVrh.20, AAVrh.21, AAVrh.22, AAVrh.23, AAVrh.24. AAVrh.25, AAVrh.2R, AAVrh.31, AAVrh.32, AAVrh.33, AAVrh.34, AAVrh.35, AAVrh.36, AAVrh.37, AAVrh.37R2, AAVrh.38, AAVrh.39, AAVrh.40, AAVrh.43, AAVrh.44, AAVrh.45, AAVrh.46, AAVrh.47, AAVrh.48, AAVrh.48, AAVrh.48.1, AAVrh.48.1.2, AAVrh.48.2, AAVrh.49, AAVrh.50, AAVrh.51, AAVrh.52, AAVrh.53, AAVrh.54, AAVrh.55, AAVrh.56, AAVrh.57, AAVrh.58, AAVrh.59, AAVrh.60, AAVrh.61, AAVrh.62, AAVrh.64, AAVrh.64R1, AAVrh.64R2, AAVrh.65, AAVrh.67, AAVrh.68, AAVrh.69, AAVrh.70, AAVrh.72, AAVrh.73. AAVrh.74, AAVrh.8, AAVrh.8R, AAVrh8R, AAVrh8R A586R mutant, AAVrh8R R533A mutant, BAAV, BNP61 AAV, BNP62 AAV. BNP63 AAV, bovine AAV, caprine AAV, Japanese AAV10, true type AAV (ttAAV), UPENN AAV10, AAV-LK16, AAAV, AAV Shuffle 100-1, AAV Shuffle 100-2, AAV Shuffle 100-3, AAV Shuffle 100-7, AAV Shuffle 10-2, AAV Shuffle 10-6, AAV Shuffle 10-8, AAV SM 100-10, AAV SM 100-3, AAV SM 10-1, AAV SM 10-2, AAV SM 10-8 and those listed in Tables 4 and 5.

[0113] In some embodiments, the donor template is encoded in an AAV vector particle, where the AAV vector serotype is selected from the group consisting of AAV1, AAV10, AAV106.1/hu.37, AAV11, AAV114.3/hu.40, AAV12, AAV127.2/hu.41, AAV127.5/hu.42, AAV128.1/hu.43, AAV128.3/hu.44, AAV130.4/hu.48, AAV145.1/hu.53, AAV145.5/hu.54, AAV145.6/hu.55, AAV16.12/hu.11, AAV16.3, AAV16.8/hu.10, AAV161.10/hu.60, AAV161.6/hu.61, AAV1-7/rh.48, AAV1-8/rh.49, AAV2, AAV2.5T, AAV2-15/rh.62, AAV223.1, AAV223.2, AAV223.4, AAV223.5, AAV223.6, AAV223.7, AAV2-3/rh.61, AAV24.1, AAV2-4/rh.50, AAV2-5/rh.51, AAV27.3, AAV29.3/bb.1, AAV29.5/bb.2, AAV2G9, AAV-2-pre-miRNA-101, AAV3, AAV3.1/hu.6, AAV3.1/hu.9, AAV3-11/rh.53, AAV3-3, AAV33.12/hu.17, AAV33.4/hu 15, AAV33.8/hu.16, AAV3-9/rh.52, AAV3a, AAV3b, AAV4, AAV4-19/rh.55, AAV42.12, AAV42-10, AAV42-1 1, AAV42-12, AAV42-13, AAV42-15, AAV42-1b, AAV42-2, AAV42-3a, AAV42-3b, AAV42-4, AAV42-5a, AAV42-5b, AAV42-6b. AAV42-8, AAV42-aa, AAV43-1, AAV43-12, AAV43-20, AAV43-21, AAV43-23, AAV43-25, AAV43-5, AAV4-4, AAV44.1, AAV44.2, AAV44.5, AAV46.2/hu.28, AAV46.6/hu.29, AAV4-8/r11.64, AAV4-8/rh.64, AAV4-9/rh.54, AAV5, AAV52.1/hu.20, AAV52/hu 19, AAV5-22/rh.58, AAV5-3/rh.57, AAV54.1/hu.21, AAV54.2/hu.22, AAV54.4R/hu.27, AAV54.5/hu.23, AAV54.7/hu.24, AAV58.2/hu.25, AAV6, AAV6.1, AAV6.1.2, AAV6.2, AAV7, AAV7.2, AAV7.3/hu.7, AAV8, AAV-8b, AAV-8h, AAV9, AAV9.11, AAV9.13, AAV9.16, AAV9.24, AAV9.45, AAV9.47, AAV9.61, AAV9.68, AAV9.84, AAV9.9, AAVA3.3, AAVA3.4, AAVA3.5, AAVA3.7, AAV-b, AAVC1, AAVC2, AAVC5, AAVCh.5, AAVCh.5R1, AAVcy.2, AAVcy.3, AAVcy.4, AAVcy.5, AAVCy.5R1, AAVCy.5R2, AAVCy.5R3, AAVCy.5R4, AAVcy.6, AAV-DJ, AAV-DJ8, AAVF3, AAVF5, AAV-h, AAVH-1/hu.1, AAVH2, AAVH-5/hu.3, AAVH6, AAVhE1.1, AAVhER1.14, AAVhEr1.16, AAVhEr1.18, AAVhER1.23, AAVhEr1.35, AAVhEr1.36, AAVhEr1.5, AAVhEr1.7, AAVhEr1.8, AAVhEr2.16, AAVhEr2.29, AAVhEr2.30, AAVhEr2.31, AAVhEr2.36, AAVhEr2.4, AAVhEr3.1, AAVhu.1, AAVhu.10, AAVhu.11, AAVhu.11, AAVhu.12, AAVhu.13, AAVhu.14/9, AAVhu.15, AAVhu.16, AAVhu.17, AAVhu.18, AAVhu.19, AAVhu.2, AAVhu.20, AAVhu.21, AAVhu.22. AAVhu.23.2, AAVhu.24, AAVhu.25, AAVhu.27, AAVhu.28, AAVhu.29, AAVhu.29R, AAVhu.3, AAVhu.31, AAVhu.32, AAVhu.34, AAVhu.35, AAVhu.37, AAVhu.39, AAVhu.4, AAVhu.40, AAVhu.41, AAVhu.42, AAVhu.43, AAVhu.44, AAVhu.44R1, AAVhu.44R2, AAVhu.44R3, AAVhu.45, AAVhu.46, AAVhu.47, AAVhu.48, AAVhu.48R1, AAVhu.48R2, AAVhu.48R3, AAVhu.49, AAVhu.5, AAVhu.51, AAVhu.52, AAVhu.53, AAVhu.54. AAVhu.55, AAVhu.56, AAVhu.57, AAVhu.58, AAVhu.6, AAVhu.60, AAVhu.61, AAVhu.63, AAVhu.64, AAVhu.66, AAVhu.67, AAVhu.7, AAVhu.8, AAVhu.9, AAVhu.t19, AAVLG-10/rh.40, AAVLG-4/rh.38, AAVLG-9/hu.39, AAVLG-9/hu.39, AAV-LK01, AAV-LK02, AAVLK03, AAV-LK03, AAV-LK04, AAV-LK05, AAV-LK06, AAV-LK07, AAV-LK08, AAV-LK09, AAV-LK10, AAV-LK11, AAV-LK12, AAV-LK13, AAV-LK14, AAV-LK15, AAV-LK17, AAV-LK18, AAV-LK19, AAVN721-8/rh.43, AAV-PAEC, AAV-PAEC11, AAV-PAEC 12, AAV-PAEC2, AAV-PAEC4, AAV-PAEC6, AAV-PAEC7, AAV-PAEC8, AAVpi.1. AAVpi.2, AAVpi.3, AAVrh.10, AAVrh.12, AAVrh.13, AAVrh.13R, AAVrh.14, AAVrh.17, AAVrh.18, AAVrh.19, AAVrh.2, AAVrh.20, AAVrh.21, AAVrh.22, AAVrh.23, AAVrh.24, AAVrh.25, AAVrh.2R, AAVrh.31, AAVrh.32, AAVrh.33, AAVrh.34, AAVrh.35, AAVrh.36, AAVrh.37, AAVrh.37R2, AAVrh.38, AAVrh.39, AAVrh.40, AAVrh.43, AAVrh.44, AAVrh.45, AAVrh.46, AAVrh.47, AAVrh.48, AAVrh.48, AAVrh.48.1, AAVrh.48.1.2, AAVrh.48.2, AAVrh.49, AAVrh.50, AAVrh.51, AAVrh.52, AAVrh.53, AAVrh.54, AAVrh.55, AAVrh.56, AAVrh.57, AAVrh.58, AAVrh.59, AAVrh.60, AAVrh.61, AAVrh.62, AAVrh.64, AAVrh.64R1, AAVrh.64R2, AAVrh.65, AAVrh.67, AAVrh.68, AAVrh.69, AAVrh.70, AAVrh.72, AAVrh.73, AAVrh.74, AAVrh.8, AAVrh.8R, AAVrh8R, AAVrh8R A586R mutant, AAVrh8R R533A mutant, BAAV, BNP61 AAV, BNP62 AAV. BNP63 AAV, bovine AAV, caprine AAV, Japanese AAV10, true type AAV (ttAAV), UPENN AAV10, AAV-LK16, AAAV, AAV Shuffle 100-1, AAV Shuffle 100-2, AAV Shuffle 100-3, AAV Shuffle 100-7, AAV Shuffle 10-2, AAV Shuffle 10-6, AAV Shuffle 10-8, AAV SM 100-10, AAV SM 100-3, AAV SM 10-1. AAV SM 10-2, AAV SM 10-8 and those listed in Tables 4 and 5.

[0114] In some embodiments, the one or more gRNAs or one or more sgRNAs is encoded in an AAV vector particle, where the AAV vector serotype is selected from the group consisting of AAV1, AAV10, AAV106.1/hu.37, AAV1, AAV114.3/hu.40, AAV12, AAV127.2/hu.41, AAV127.5/hu.42, AAV128.1/hu.43, AAV128.3/hu.44, AAV130.4/hu.48, AAV145.1/hu.53, AAV145.5/hu.54, AAV145.6/hu.55, AAV16.12/hu.11, AAV16.3, AAV16.8/hu.10, AAV161.10/hu.60, AAV161.6/hu.61, AAV1-7/rh.48, AAV1-8/rh.49, AAV2, AAV2.5T, AAV2-15/rh.62, AAV223.1, AAV223.2, AAV223.4, AAV223.5, AAV223.6, AAV223.7, AAV2-3/rh.61, AAV24.1, AAV2-4/rh.50, AAV2-5/rh.51, AAV27.3, AAV29.3/bb.1, AAV29.5/bb.2, AAV2G9, AAV-2-pre-miRNA-01, AAV3, AAV3.1/hu.6, AAV3.1/hu.9, AAV3-11/rh.53, AAV3-3, AAV33.12/hu.17, AAV33.4/hu.15, AAV33.8/hu.16, AAV3-9/rh.52, AAV3a, AAV3b, AAV4, AAV4-19/rh.55, AAV42.12, AAV42-10, AAV42-11, AAV42-12, AAV42-13, AAV42-15, AAV42-1b, AAV42-2, AAV42-3a, AAV42-3b, AAV42-4, AAV42-5a, AAV42-5b, AAV42-6b, AAV42-8, AAV42-aa, AAV43-1, AAV43-12, AAV43-20, AAV43-21, AAV43-23, AAV43-25, AAV43-5, AAV4-4, AAV44.1, AAV44.2, AAV44.5, AAV46.2/hu.28, AAV46.6/hu.29, AAV4-8/r11.64, AAV4-8/rh.64, AAV4-9/rh.54, AAV5, AAV52.1/hu.20, AAV52/hu.19, AAV5-22/rh.58, AAV5-3/rh.57, AAV54. I/hu.21, AAV54.2/hu.22, AAV54.4R/hu.27, AAV54.5/hu.23, AAV54.7/hu 24, AAV58.2/hu.25, AAV6, AAV6.1, AAV6.1.2, AAV6.2, AAV7, AAV7.2, AAV7.3/hu.7, AAV8, AAV-8b, AAV-8h, AAV9, AAV9.11, AAV9.13, AAV9.16, AAV9.24, AAV9.45, AAV9.47, AAV9.61, AAV9.68, AAV9.84, AAV9.9, AAVA3.3, AAVA3.4, AAVA3.5, AAVA3.7, AAV-b, AAVC1, AAVC2, AAVC5, AAVCh.5, AAVCh.5R1, AAVcy.2, AAVcy.3, AAVcy.4, AAVcy.5, AAVCy.5R1, AAVCy.5R2, AAVCy.5R3, AAVCy.5R4, AAVcy.6, AAV-DJ, AAV-DJ8, AAVF3, AAVF5, AAV-h, AAVH-1/hu.1, AAVH2, AAVH-5/hu.3, AAVH6, AAVhE1.1, AAVhER1.14, AAVhEr1.16, AAVhEr1.18, AAVhER1.23, AAVhEr1.35, AAVhEr1.36, AAVhEr1.5, AAVhEr1.7, AAVhEr1.8, AAVhEr2.16, AAVhEr2.29, AAVhEr2.30, AAVhEr2.31, AAVhEr2.36, AAVhEr2.4, AAVhEr3.1, AAVhu.1, AAVhu.10, AAVhu.11, AAVhu.11, AAVhu.12, AAVhu.13, AAVhu.14/9, AAVhu.15, AAVhu.16, AAVhu.17, AAVhu.18, AAVhu.19, AAVhu.2, AAVhu.20, AAVhu.21, AAVhu.22, AAVhu.23.2, AAVhu.24, AAVhu.25, AAVhu.27, AAVhu.28, AAVhu.29, AAVhu.29R, AAVhu.3, AAVhu.31, AAVhu.32, AAVhu.34, AAVhu.35, AAVhu.37, AAVhu.39, AAVhu.4, AAVhu.40, AAVhu.41, AAVhu.42, AAVhu.43, AAVhu.44, AAVhu.44R1, AAVhu.44R2, AAVhu.44R3, AAVhu.45, AAVhu.46, AAVhu.47, AAVhu.48, AAVhu.48R1, AAVhu.48R2, AAVhu.48R3, AAVhu.49, AAVhu.5, AAVhu.51, AAVhu.52, AAVhu.53, AAVhu.54, AAVhu.55, AAVhu.56, AAVhu.57, AAVhu.58, AAVhu.6, AAVhu.60, AAVhu.61, AAVhu.63, AAVhu.64, AAVhu.66, AAVhu.67, AAVhu.7, AAVhu.8, AAVhu.9, AAVhu.t19, AAVLG-10/rh.40, AAVLG-4/rh.38, AAVLG-9/hu.39, AAVLG-9/hu.39, AAV-LK01, AAV-LK02, AAVLK03, AAV-LK03, AAV-LK04, AAV-LK05, AAV-LK06, AAV-LK07, AAV-LK08, AAV-LK09, AAV-LK10, AAV-LK11, AAV-LK12, AAV-LK13, AAV-LK14, AAV-LK15, AAV-LK17, AAV-LK18, AAV-LK19, AAVN721-8/rh.43, AAV-PAEC, AAV-PAEC11, AAV-PAEC12, AAV-PAEC2, AAV-PAEC4, AAV-PAEC6, AAV-PAEC7, AAV-PAEC8, AAVpi.1, AAVpi.2, AAVpi.3, AAVrh.10, AAVrh.12, AAVrh.13, AAVrh.13R, AAVrh.14, AAVrh.17, AAVrh.18, AAVrh.19, AAVrh.2, AAVrh.20, AAVrh.21, AAVrh.22, AAVrh.23, AAVrh.24, AAVrh.25, AAVrh.2R, AAVrh.31, AAVrh.32, AAVrh.33, AAVrh.34, AAVrh.35, AAVrh.36, AAVrh.37, AAVrh.37R2, AAVrh.38, AAVrh.39, AAVrh.40, AAVrh.43, AAVrh.44, AAVrh.45, AAVrh.46, AAVrh.47, AAVrh.48, AAVrh.48, AAVrh.48.1, AAVrh.48.1.2, AAVrh.48.2, AAVrh.49, AAVrh.50, AAVrh.51, AAVrh.52, AAVrh.53, AAVrh.54, AAVrh.55, AAVrh.56, AAVrh.57, AAVrh.58, AAVrh.59, AAVrh.60, AAVrh.61, AAVrh.62, AAVrh.64, AAVrh.64R1, AAVrh.64R2, AAVrh.65, AAVrh.67, AAVrh.68, AAVrh.69, AAVrh.70, AAVrh.72, AAVrh.73, AAVrh.74, AAVrh.8, AAVrh.8R, AAVrh8R, AAVrh8R A586R mutant, AAVrh8R R533A mutant, BAAV, BNP61 AAV, BNP62 AAV, BNP63 AAV, bovine AAV, caprine AAV, Japanese AAV10, true type AAV (ttAAV), UPENN AAV10, AAV-LK16, AAAV, AAV Shuffle 100-1, AAV Shuffle 100-2, AAV Shuffle 100-3, AAV Shuffle 100-7, AAV Shuffle 10-2, AAV Shuffle 10-6, AAV Shuffle 10-8, AAV SM 100-10, AAV SM 100-3, AAV SM 10-1, AAV SM 10-2, AAV SM 10-8 and those listed in Tables 4 and 5. The method of any one of claims 1, 6, 11, 16, or 20-45, wherein the Cas9 or Cpf1 mRNA is formulated into a lipid nanoparticle, and the gRNA is delivered to the cell by electroporation and donor template is delivered to the cell by an adeno-associated virus (AAV) vector.

[0115] Provided herein is a method for editing a Wiskott-Aldrich syndrome gene (WAS gene) in a mammalian or other type cell by genome editing including the step of introducing into the cell one or more deoxyribonucleic acid (DNA) endonucleases to effect one or more single-strand breaks (SSBs) or double-strand breaks (DSBs) at, within, or near the WAS gene or other DNA sequences that encode regulatory elements of the WAS gene (neighboring genes) that results in a permanent insertion and/or deletion, to effect correction, or modulation of expression or function of the WAS gene and results in restoration of WAS protein activity, function or levels. As used herein, a WAS gene related disorder includes any disorder that is causally related to WAS gene or a gene that is the upstream or downstream or opposing strand gene of WAS gene in the chromosome.

[0116] Also provided herein is an ex vivo method for treating a patient (e.g., a human) with Wiskott-Aldrich Syndrome (WAS) or WAS gene related disorder, the method having the steps of: creating a patient specific induced pluripotent stem cell (iPSC); editing at, within, or near a Wiskott-Aldrich syndrome gene (WAS gene) or other DNA sequences that encode regulatory elements of the WAS gene of the iPSC; differentiating the genome-edited iPSC into a cell of choice, such as a hepatocyte; and implanting the differentiated and edited stem cell into the patient.

[0117] The step of creating a patient specific induced pluripotent stem cell (iPSC) can have: a) isolating a somatic cell from the patient; and b) introducing a set of pluripotency-associated genes into the somatic cell to induce the somatic cell to become a pluripotent stem cell. The somatic cell can be a fibroblast. The set of pluripotency-associated genes can be one or more of the genes selected from the group consisting of OCT4, SOX1, SOX2. SOX3, SOX15, SOX18, NANOG, KLF1, KLF2, KLF4, KLF5, c-MYC, n-MYC, REM2, TERT and LIN28.

[0118] The step of editing at, within, or near a Wiskott-Aldrich syndrome gene (WAS gene) or other DNA sequences that encode regulatory elements of the WAS gene of the iPSC can include introducing into the iPSC one or more deoxyribonucleic acid (DNA) endonucleases to effect one or more single-strand breaks (SSBs) or double-strand breaks (DSBs) at, within, or near the WAS gene or other DNA sequences that encode regulatory elements of the WAS gene that results in a permanent insertion, correction, or modulation of expression or function of one or more mutations at, within, or near or affecting the expression or function of the WAS gene and results in restoration of WAS protein activity.

[0119] The step of differentiating the genome-edited iPSC into another cell, e.g., a hepatocyte may have one or more of the following: contacting the genome-edited iPSC with one or more of activin, B27 supplement, FGF4, HGF, BMP2, BMP4, Oncostatin M, dexamethasone.

[0120] The step of implanting the differentiated cells into the patient can include implanting the cell into the patient by local injection, systemic infusion, or combinations thereof.

[0121] Also provided herein is an ex vivo method for treating a patient (e.g., a human) with Wiskott-Aldrich Syndrome (WAS) or WAS gene related disorder, the method having the steps of: performing a biopsy of the patient's tissue; isolating a tissue specific progenitor cell or primary cell; editing the WAS gene or other DNA sequences that encode regulatory elements of the progenitor cell or primary cell; and implanting the progenitor cell or primary cell into the patient.

[0122] The step of isolating a tissue specific progenitor cell or primary cell can include: perfusion of fresh tissues with digestion enzymes, cell differential centrifugation, cell culturing, or combinations thereof.

[0123] The step of editing at, within, or near a Wiskott-Aldrich syndrome gene (WAS gene) or other DNA sequences that encode regulatory elements of the WAS gene of the progenitor cell or primary cell may include introducing into the progenitor cell or primary cell one or more deoxyribonucleic acid (DNA) endonucleases to effect one or more single-strand breaks (SSBs) or double-strand breaks (DSBs) at, within, or near the WAS gene or other DNA sequences that encode regulatory elements of the WAS gene that results in a permanent insertion, correction, or modulation of expression or function of one or more mutations at, within, or near or affecting the expression or function of the WAS gene and restoration of WAS protein activity.

[0124] Also provided herein is an ex vivo method for treating a patient (e.g., a human) with Wiskott-Aldrich Syndrome (WAS), the method having the steps of: isolating a mesenchymal stem cell from the patient; editing at, within, or near a Wiskott-Aldrich syndrome gene (WAS gene) or other DNA sequences that encode regulatory elements of the WAS gene of the mesenchymal stem cell; differentiating the genome-edited mesenchymal stem cell into another cell; and implanting the differentiated cell into the patient.

[0125] The mesenchymal stem cell can be isolated from the patient's bone marrow or peripheral blood. The step of isolating a mesenchymal stem cell from the patient can include aspiration of bone marrow and isolation of mesenchymal cells by density centrifugation using Percoll™.

[0126] The step of editing at, within, or near the Wiskott-Aldrich syndrome gene (WAS gene) or other DNA sequences that encode regulatory elements of the WAS gene of the mesenchymal stem cell can include introducing into the mesenchymal stem cell one or more deoxyribonucleic acid (DNA) endonucleases to effect one or more single-strand breaks (SSBs) or double-strand breaks (DSBs) at, within, or near the WAS gene or other DNA sequences that encode regulatory elements of the WAS gene that results in a permanent insertion, correction, or modulation of expression or function of one or more mutations at, within, or near or affecting the expression or function of the WAS gene and restoration of WAS protein activity.

[0127] Also provided herein is an in vivo method for treating a patient (e.g., a human) with Wiskott-Aldrich Syndrome (WAS) having the step of editing a Wiskott-Aldrich syndrome gene (WAS gene) in a cell of the patient.

[0128] The step of editing a Wiskott-Aldrich syndrome gene (WAS gene) in a cell of the patient can include introducing into the cell one or more deoxyribonucleic acid (DNA) endonucleases to effect one or more single-strand breaks (SSBs) or double-strand breaks (DSBs) at, within, or near the WAS gene or other DNA sequences that encode regulatory elements of the WAS gene that results in a permanent insertion, correction, or modulation of expression or function of one or more mutations at, within, or near or affecting the expression or function of the WAS gene and restoration of WAS protein activity. This method may also include editing one or more neighboring genes to WAS gene. As used herein, a neighboring gene is a gene found immediately upstream, downstream or on the opposing strand of the genomic DNA relative to WAS gene.

[0129] The one or more DNA endonucleases can be a Cas1, Cas1B, Cas2, Cas3, Cas4, Cas5, Cas6, Cas7, Cas8, Cas9 (also known as Csn1 and Csx12), Cas100, Csy1, Csy2, Csy3, Cse1, Cse2, Csc1, Csc2, Csa5, Csn2, Csm2, Csm3, Csm4, Csm5, Csm6, Cmr1, Cmr3, Cmr4, Cmr5, Cmr6, Csb1, Csb2, Csb3, Csx17, Csx14, Csx10, Csx16, CsaX, Csx3, Csx1, Csx15, Csf1, Csf2, Csf3, Csf4, or Cpf1 endonuclease; or a homolog, recombination of the naturally occurring molecule, codon-optimized, or modified version thereof, and combinations of any of the foregoing. Any of the endonucleases disclosed herein may be used.

[0130] The methods of the present disclosure may include introducing into the cell one or more polynucleotides encoding the one or more DNA endonucleases. The method can include introducing into the cell one or more ribonucleic acids (RNAs) encoding the one or more DNA endonucleases. The one or more polynucleotides or one or more RNAs can be one or more modified polynucleotides or one or more modified RNAs.

[0131] The method can include introducing into the cell one or more DNA endonucleases wherein the one or more DNA endonucleases is a protein or polypeptide. Such proteins or polypeptides may include other elements such as cell penetrating proteins, signals for localization such as nuclear localization signals, stabilization domains, additional conjugates and/or cleavage sites or signals.

[0132] The method can further include introducing into the cell one or more guide ribonucleic acids (gRNAs). The one or more gRNAs can be single-molecule guide RNA (sgRNAs). The one or more gRNAs or one or more sgRNAs can be one or more modified gRNAs, one or more modified sgRNAs, or combinations thereof. The one or more DNA endonucleases can be pre-complexed with one or more gRNAs, one or more sgRNAs, or combinations thereof.

[0133] The method can further include introducing into the cell a polynucleotide donor template having at least a portion of the wild-type WAS gene. DNA sequences that encode wild-type regulatory elements of the WAS gene, and/or cDNA. The reference sequences of WAS gene, e.g, a genomic sequence containing the WAS locus and WAS mRNA sequence can be obtained via NCBI database using the ID No. NG_007877.1 and NM_000377.2, respectively. The sequence of WAS gene or any regulatory and neighboring sequences can be obtained from such resources and used to generate a suitable donor template. The at least a portion of the wild-type WAS gene or cDNA can be any of the exons or introns as defined herein. Such portions may include more than one intron or exon as well as sequence regions bridging exons and introns, e.g., intron:exon junctions, intronic regions, fragments or combinations thereof, or the entire WAS gene or cDNA. In some embodiments, such portions can also include upstream and/or downstream sequences of the wild-type WAS gene. Therefore, in some embodiments a polynucleotide donor template can have a WAS gene or cDNA and a sequence neighboring (or surrounding) the endogenous WAS gene. In some embodiments, a polynucleotide donor template can have a WAS gene or cDNA and an upstream sequence of the endogenous WAS gene (e.g, at least or about 500 bp upstream sequence including the proximal promoter of the endogenous WAS gene). In some embodiments, a polynucleotide donor template can have a WAS gene or cDNA and a downstream sequence the endogenous WAS gene. The donor template can be either a single or double stranded polynucleotide. The donor template can have homologous arms to the pq34.11 region.

[0134] The method can further have introducing into the cell one guide ribonucleic acid (gRNA) and a polynucleotide donor template having at least a portion of the wild-type WAS gene. The method can further have introducing into the cell one guide ribonucleic acid (gRNA) and a polynucleotide donor template having at least a portion of a codon optimized or modified WAS gene. The one or more DNA endonucleases can be one or more Cas9 or Cpf1 endonucleases that effect one single-strand break (SSB) or double-strand break (DSB) at a locus at, within, or near the WAS gene (or codon optimized or modified WAS gene) or other DNA sequences that encode regulatory elements of the WAS gene that facilitates insertion of a new sequence from the polynucleotide donor template into the chromosomal DNA at the locus that results in a permanent insertion or correction of a part of the chromosomal DNA of the WAS gene or other DNA sequences that encode regulatory elements of the WAS gene proximal to the locus. The gRNA can have a spacer sequence that is complementary to a segment of the locus. Proximal can mean nucleotides both upstream and downstream of the locus.

[0135] The method can further have introducing into the cell two guide ribonucleic acid (gRNAs) and a polynucleotide donor template having at least a portion of the wild-type WAS gene. The one or more DNA endonucleases can be one or more Cas9 or Cpf1 endonucleases that effect or create at least two (e.g., a pair) single-strand breaks (SSBs) and/or double-strand breaks (DSBs), the first at a 5′ locus and the second at a 3′ locus, at, within, or near the WAS gene or other DNA sequences that encode regulatory elements of the WAS gene that facilitates insertion of a new sequence from the polynucleotide donor template into the chromosomal DNA between the 5′ locus and the 3′ locus that results in a permanent insertion or correction of the chromosomal DNA between the 5′ locus and the 3′ locus at, within, or near the WAS gene or other DNA sequences that encode regulatory elements of the WAS gene. The first guide RNA can have a spacer sequence that is complementary to a segment of the 5′ locus and the second guide RNA can have a spacer sequence that is complementary to a segment of the 3′ locus.

[0136] The one or two gRNAs can be one or two single-molecule guide RNA (sgRNAs). The one or two gRNAs or one or two sgRNAs can be one or two modified gRNAs or one or two modified sgRNAs. The one or more DNA endonucleases can be pre-complexed with one or two gRNAs or one or two sgRNAs.

[0137] The at least a portion of the wild-type WAS gene or cDNA can be any of the exons or introns as defined herein. Such portions may include more than one intron or exon as well as sequence regions bridging exons and introns, e.g., intron:exon junctions, intronic regions, fragments or combinations thereof, or the entire WAS gene or cDNA.

[0138] The donor template can be either a single or double stranded polynucleotide. The donor template can have homologous arms to the chromosomal region encoding the gene target.

[0139] The SSB, DSB, 5′ DSB, and/or 3′ DSB can be in any intron, exon, or junction thereof.

[0140] The gRNA or sgRNA can be directed to one or more of the following pathological variants, such as any of the single nucleotide polymorphisms associated with WAS gene disclosed herein.

[0141] The insertion or correction can be by homology directed repair (HDR).

[0142] Cas9 or Cpf1 mRNA, gRNA, and donor template can be formulated into separate lipid nanoparticles or co-formulated into a lipid nanoparticle.

[0143] The Cas9 or Cpf1 mRNA can be formulated into a lipid nanoparticle, and the gRNA and donor template can be delivered to the cell by an adeno-associated virus (AAV) vector.

[0144] The Cas9 or Cpf1 mRNA can be formulated into a lipid nanoparticle, and the gRNA can be delivered to the cell by electroporation and donor template can be delivered to the cell by an adeno-associated virus (AAV) vector.

[0145] The restoration of WAS protein activity can be compared to wild-type or normal WAS protein activity.

[0146] Also provided herein is one or more guide ribonucleic acids (gRNAs) for editing a WAS gene in a cell from a patient with Wiskott-Aldrich Syndrome (WAS). The one or more gRNAs and/or sgRNAs can have a spacer sequence selected from the group consisting of any nucleic acid 12-200 nucleotides in length which act to guide the endonuclease to the gene. The one or more gRNAs can be one or more single-molecule guide RNAs (sgRNAs). The one or more gRNAs or one or more sgRNAs can be one or more modified gRNAs or one or more modified sgRNAs.

### BRIEF DESCRIPTION OF THE DRAWINGS

[0147] Various aspects of materials and methods disclosed and described in this specification can be better understood by reference to the accompanying figures, in which:

[0148] FIG. 1A is a plasmid (CTx-1) having a codon optimized gene for S. pyogenes Cas9 endonuclease. The CTx-1 plasmid also has a gRNA scaffold sequence, which includes a 15-200 bp spacer sequence.

[0149] FIG. 1B is a plasmid (CTx-2) having a different codon optimized gene for S. pyogenes Cas9 endonuclease. The CTx-2 plasmid also has a gRNA scaffold sequence, which includes a 15-200 bp spacer sequence.

[0150] FIG. 1C is a plasmid (CTx-3) having yet another different codon optimized gene for S. pyogenes Cas9 endonuclease. The CTx-3 plasmid also has a gRNA scaffold sequence, which includes a 15-200 bp spacer sequence.

[0151] FIG. 2A is a depiction of the type II CRISPR/Cas system.

[0152] FIG. 2B is another depiction of the type II CRISPR/Cas system.

[0153] FIG. 3 is a viral vector (pAAV_WAS_mCherry-HA) having WAS cDNA for insertion and mCherry marker gene.

[0154] FIG. 4 is a viral vector (pAAV_MND_WAS_mCherry AAV HA) having WAS cDNA for insertion and mCherry marker gene.

### DETAILED DESCRIPTION

### I. Introduction

### Genome Editing

[0155] Genome editing generally refers to the process of modifying the nucleotide sequence of a genome, preferably in a precise or pre-determined manner. Examples of methods of genome editing described herein include methods of using site-directed nucleases to cut deoxyribonucleic acid (DNA) at precise target locations in the genome, thereby creating single-strand or double-strand DNA breaks at particular locations within the genome. Such breaks can be and regularly are repaired by natural, endogenous cellular processes, such as homology-directed repair (HDR) and NHEJ, as recently reviewed in Cox et al., Nature Medicine 21(2), 121-31 (2015). These two main DNA repair processes consist of a family of alternative pathways. NHEJ directly joins the DNA ends resulting from a double-strand break, sometimes with the loss or addition of nucleotide sequence, which may disrupt or enhance gene expression. HDR utilizes a homologous sequence, or donor sequence, as a template for inserting a defined DNA sequence at the break point. The homologous sequence can be in the endogenous genome, such as a sister chromatid. Alternatively, the donor can be an exogenous nucleic acid, such as a plasmid, a single-strand oligonucleotide, a double-stranded oligonucleotide, a duplex oligonucleotide or a virus, that has regions of high homology with the nuclease-cleaved locus, but which can also contain additional sequence or sequence changes including deletions that can be incorporated into the cleaved target locus. A third repair mechanism can be microhomology-mediated end joining (MMEJ), also referred to as “Alternative NHEJ”, in which the genetic outcome is similar to NHEJ in that small deletions and insertions can occur at the cleavage site. MMEJ can make use of homologous sequences of a few base pairs flanking the DNA break site to drive a more favored DNA end joining repair outcome, and recent reports have further elucidated the molecular mechanism of this process; see, e.g., Cho and Greenberg, Nature 518, 174-76 (2015); Kent et al., Nature Structural and Molecular Biology, Adv. Online doi:10.1038/nsmb.2961(2015); Mateos-Gomez et al., Nature 518, 254-57 (2015); Ceccaldi et al., Nature 528, 258-62 (2015). In some instances, it may be possible to predict likely repair outcomes based on analysis of potential microhomologies at the site of the DNA break.

[0156] Each of these genome editing mechanisms can be used to create desired genomic alterations. A step in the genome editing process can be to create one or two DNA breaks, the latter as double-strand breaks or as two single-stranded breaks, in the target locus as near the site of intended mutation. This can be achieved via the use of site-directed polypeptides, as described and illustrated herein.

[0157] Site-directed polypeptides, such as a DNA endonuclease, can introduce double-strand breaks or single-strand breaks in nucleic acids, e.g., genomic DNA. The double-strand break can stimulate a cell's endogenous DNA-repair pathways (e.g., homology-dependent repair or non-homologous end joining or alternative non-homologous end joining (A-NHEJ) or microhomology-mediated end joining). NHEJ can repair cleaved target nucleic acid without the need for a homologous template. This can sometimes result in small deletions or insertions (InDels) in the target nucleic acid at the site of cleavage, and can lead to disruption or alteration of gene expression. HDR can occur when a homologous repair template, or donor, is available. The homologous donor template can have sequences that can be homologous to sequences flanking the target nucleic acid cleavage site. The sister chromatid can be used by the cell as the repair template. However, for the purposes of genome editing, the repair template can be supplied as an exogenous nucleic acid, such as a plasmid, duplex oligonucleotide, single-strand oligonucleotide, double-stranded oligonucleotide, or viral nucleic acid. With exogenous donor templates, an additional nucleic acid sequence (such as a transgene) or modification (such as a single or multiple base change or a deletion) can be introduced between the flanking regions of homology so that the additional or altered nucleic acid sequence also becomes incorporated into the target locus. MMEJ can result in a genetic outcome that is similar to NHEJ in that small deletions and insertions can occur at the cleavage site. MMEJ can make use of homologous sequences of a few base pairs flanking the cleavage site to drive a favored end-joining DNA repair outcome. In some instances, it may be possible to predict likely repair outcomes based on analysis of potential microhomologies in the nuclease target regions.

[0158] Thus, in some cases, homologous recombination can be used to insert an exogenous polynucleotide sequence into the target nucleic acid cleavage site. An exogenous polynucleotide sequence is termed a donor polynucleotide (or donor or donor sequence or polynucleotide donor template) herein. The donor polynucleotide, a portion of the donor polynucleotide, a copy of the donor polynucleotide, or a portion of a copy of the donor polynucleotide can be inserted into the target nucleic acid cleavage site. The donor polynucleotide can be an exogenous polynucleotide sequence, i.e., a sequence that does not naturally occur at the target nucleic acid cleavage site.

[0159] The modifications of the target DNA due to NHEJ and/or HDR can lead to, for example, mutations, deletions, alterations, integrations, gene correction, gene replacement, gene tagging, transgene insertion, nucleotide deletion, gene disruption, translocations and/or gene mutation. The processes of deleting genomic DNA and integrating non-native nucleic acid into genomic DNA are examples of genome editing.

### CRISPR Endonuclease System

[0160] A CRISPR (Clustered Regularly Interspaced Short Palindromic Repeats) genomic locus can be found in the genomes of many prokaryotes (e.g., bacteria and archaea). In prokaryotes, the CRISPR locus encodes products that function as a type of immune system to help defend the prokaryotes against foreign invaders, such as virus and phage. There are three stages of CRISPR locus function: integration of new sequences into the CRISPR locus, expression of CRISPR RNA (crRNA), and silencing of foreign invader nucleic acid. Five types of CRISPR systems (e.g., Type I, Type II, Type III, Type U, and Type V) have been identified.

[0161] A CRISPR locus includes a number of short repeating sequences referred to as “repeats.” When expressed, the repeats can form secondary structures (e.g., hairpins) and/or have unstructured single-stranded sequences. The repeats usually occur in clusters and frequently diverge between species. The repeats are regularly interspaced with unique intervening sequences referred to as “spacers,” resulting in a repeat-spacer-repeat locus architecture. The spacers are identical to or have high homology with known foreign invader sequences. A spacer-repeat unit encodes a crisprRNA (crRNA), which is processed into a mature form of the spacer-repeat unit. A crRNA has a “seed” or spacer sequence that is involved in targeting a target nucleic acid (in the naturally occurring form in prokaryotes, the spacer sequence targets the foreign invader nucleic acid). A spacer sequence is located at the 5′ or 3′ end of the crRNA.

[0162] A CRISPR locus also has polynucleotide sequences encoding CRISPR Associated (Cas) genes. Cas genes encode endonucleases involved in the biogenesis and the interference stages of crRNA function in prokaryotes. Some Cas genes have homologous secondary and/or tertiary structures.

### Type II CRISPR Systems

[0163] crRNA biogenesis in a Type II CRISPR system in nature requires a trans-activating CRISPR RNA (tracrRNA). The tracrRNA can be modified by endogenous RNaseIII, and then hybridizes to a crRNA repeat in the pre-crRNA array. Endogenous RNaseIII can be recruited to cleave the pre-crRNA. Cleaved crRNAs can be subjected to exoribonuclease trimming to produce the mature crRNA form (e.g., 5′ trimming). The tracrRNA can remain hybridized to the crRNA, and the tracrRNA and the crRNA associate with a site-directed polypeptide (e.g., Cas9). The crRNA of the crRNA-tracrRNA-Cas9 complex can guide the complex to a target nucleic acid to which the crRNA can hybridize. Hybridization of the crRNA to the target nucleic acid can activate Cas9 for targeted nucleic acid cleavage. The target nucleic acid in a Type II CRISPR system is referred to as a protospacer adjacent motif (PAM). In nature, the PAM is essential to facilitate binding of a site-directed polypeptide (e.g., Cas9) to the target nucleic acid. Type II systems (also referred to as Nmeni or CASS4) are further subdivided into Type II-A (CASS4) and II-B (CASS4a). Jinek et al., Science, 337(6096):816-821 (2012) showed that the CRISPR/Cas9 system is useful for RNA-programmable genome editing, and international patent application publication number WO2013/176772 provides numerous examples and applications of the CRISPR/Cas endonuclease system for site-specific gene editing.

### Type V CRISPR Systems

[0164] Type V CRISPR systems have several important differences from Type II systems. For example, Cpf1 is a single RNA-guided endonuclease that, in contrast to Type II systems, lacks tracrRNA. In fact, Cpf1-associated CRISPR arrays can be processed into mature crRNAs without the requirement of an additional trans-activating tracrRNA. The Type V CRISPR array can be processed into short mature crRNAs of 42-44 nucleotides in length, with each mature crRNA beginning with 19 nucleotides of direct repeat followed by 23-25 nucleotides of spacer sequence. In contrast, mature crRNAs in Type II systems can start with 20-24 nucleotides of spacer sequence followed by about 22 nucleotides of direct repeat. Also. Cpf1 can utilize a T-rich protospacer-adjacent motif such that Cpf1-crRNA complexes efficiently cleave target DNA preceded by a short T-rich PAM, which is in contrast to the G-rich PAM following the target DNA for Type II systems. Thus, Type V systems cleave at a point that is distant from the PAM, while Type II systems cleave at a point that is adjacent to the PAM. In addition, in contrast to Type II systems, Cpf1 cleaves DNA via a staggered DNA double-stranded break with a 4 or 5 nucleotide 5′ overhang. Type II systems cleave via a blunt double-stranded break. Similar to Type II systems, Cpf1 contains a predicted RuvC-like endonuclease domain, but lacks a second HNH endonuclease domain, which is in contrast to Type II systems.

### Cas Genes/Polypeptides and Protospacer Adjacent Motifs

[0165] Exemplary CRISPR/Cas polypeptides include the Cas9 polypeptides in FIG. 1 of Fonfara et al., Nucleic Acids Research. 42: 2577-2590 (2014). The CRISPR/Cas gene naming system has undergone extensive rewriting since the Cas genes were discovered. FIG. 5 of Fonfara, supra, provides PAM sequences for the Cas9 polypeptides from various species.

[0166] For monogenic disorders with recessive inheritance, it is likely that correcting one of the mutant alleles per cell will be sufficient for correction. The correction of one allele can coincide with one copy that remains with the original mutation, or a copy that was cleaved and repaired by non-homologous end joining (NHEJ) and therefore was not properly corrected. Bi-allelic correction can also occur. Various editing strategies that can be employed for specific mutations are discussed below.

[0167] Correction of one or possibly both of the mutant alleles provides an important improvement over existing therapies, such as introduction of WAS gene expression cassettes through lentivirus delivery and integration. Gene editing to correct the mutation has the advantage of restoration of correct expression levels and temporal control. Sequencing the patient's Wiskott-Aldrich syndrome gene alleles allows for design of the gene editing strategy to best correct the identified mutation(s).

[0168] For example, the mutation can be corrected by the insertions or deletions that arise due to the imprecise NHEJ repair pathway. If the patient's WAS gene has an inserted or deleted base, a targeted cleavage can result in a NHEJ-mediated insertion or deletion that restores the frame. Missense mutations can also be corrected through NHEJ-mediated correction using one or more guide RNA. The ability or likelihood of the cut(s) to correct the mutation can be designed or evaluated based on the local sequence and micro-homologies. NHEJ can also be used to delete segments of the gene, either directly or by altering splice donor or acceptor sites through cleavage by one gRNA targeting several locations, or several gRNAs. This may be useful if an amino acid, domain or exon contains the mutations and can be removed or inverted, or if the deletion otherwise restored function to the protein. Pairs of guide strands have been used for deletions and corrections of inversions.

[0169] Alternatively, the donor for correction by homology directed repair (HDR) contains the corrected sequence with small or large flanking homology arms to allow for annealing. HDR is essentially an error-free mechanism that uses a supplied homologous DNA sequence as a template during DSB repair. The rate of homology directed repair (HDR) is a function of the distance between the mutation and the cut site so choosing overlapping or nearby target sites is important. Templates can include extra sequences flanked by the homologous regions or can contain a sequence that differs from the genomic sequence, thus allowing sequence editing.

[0170] In addition to correcting mutations by NHEJ or HDR, a range of other options are possible. If there are small or large deletions or multiple mutations, a cDNA can be knocked in that contains the exons affected. A full length cDNA can be knocked into any “safe harbor”—i.e., non-deleterious insertion point that is not the WAS gene itself—with or without suitable regulatory sequences. If this construct is knocked-in near the WAS gene regulatory elements, it should have physiological control, similar to the normal gene. Two or more (e.g., a pair) nucleases can be used to delete mutated gene regions, though a donor would usually have to be provided to restore function. In this case two gRNA and one donor sequence would be supplied.

### II. Compositions and Methods

[0171] Provided herein are cellular, ex vivo and in vivo methods for using genome engineering tools to create permanent changes to the genome by: 1) correcting, by insertions or deletions that arise due to the imprecise NHEJ pathway, one or more mutations at, within, or near the WAS gene, 2) correcting, by HDR, one or more mutations at, within, or near the WAS gene, or 3) knocking-in WAS gene cDNA or a minigene (which may have one or more exons or introns or natural or synthetic introns) into the gene locus or at a heterologous location in the genome (such as a safe harbor locus, such as, e.g., targeting an AAVS1 (PPP1R12C), an ALB gene, an Angpt13 gene, an ApoC3 gene, an ASGR2 gene, a CCR5 gene, a FIX (F9) gene, a G6PC gene, a Gys2 gene, an HGD gene, a Lp(a) gene, a Pcsk9 gene, a Serpinal gene, a TF gene, and a TTR gene). Assessment of efficiency of HDR mediated knock-in of cDNA into the first exon can utilize cDNA knock-in into “safe harbor” sites such as: single-stranded or double-stranded DNA having homologous arms to one of the following regions, for example: ApoC3 (chr11:116829908-116833071), Angpt13 (chr1:62,597,487-62,606,305), Serpinal (chr14:94376747-94390692), Lp(a) (chr6:160531483-160664259), Pcsk9 (chr1:55,039,475-55,064,852), FIX (chrX: 139,530,736-139,563,458), ALB (chr4:73,404,254-73,421,411), TTR (chr18:31,591,766-31,599,023), TF (chr3:133,661,997-133,779,005), G6PC (chr17:42,900,796-42,914,432), Gys2 (chr12:21,536,188-21,604.857), AAVS1(PPP1R12C) (chr19:55,090,912-55,117,599), HGD (chr3:120,628,167-120,682,570), CCR5 (chr3:46,370,854-46,376,206), ASGR2 (chr17:7,101,322-7,114,310). Such methods use endonucleases, such as CRISPR-associated (Cas9, Cpf1 and the like) nucleases, to permanently insert, edit or correct one or more mutations at, within, or near the genomic locus of the WAS gene or other DNA sequences that encode regulatory elements of the WAS gene. In this way, examples set forth in the present disclosure can help to restore the reading frame or the wild-type sequence of, or otherwise correct, the gene with a single treatment (rather than deliver potential therapies for the lifetime of the patient).

[0172] Non-limiting examples of Cas9 orthologs from other bacterial strains including but not limited to, Cas proteins identified in Acaryochloris marina MBIC 11017; Acetohalobium arabaticum DSM 5501; Acidithiobacillus caldus; Acidithiobacillus ferrooxidans ATCC 23270; Alicyclobacillus acidocaldarius LAA; Alicyclobacillus acidocaldarius subsp. acidocaldarius DSM 446; Allochromatium vinosum DSM 180; Ammonifex degensii KC4; Anabaena variabilis ATCC 29413; Arthrospira maxima CS-328; Arthrospira platensis str. Paraca; Arthrospira sp. PCC 8005; Bacillus pseudomycoides DSM 12442; Bacillus selenitireducens MLS 10; Burkholderiales bacterium 1_1_47; Caldicelulosiruptor becscii DSM 6725; Candidatus Desulforudis audaxviator MP104C; Caldicellulosiruptor hydrothermalis_108; Clostridium phage c-st; Clostridium botulinum A3 str. Loch Maree; Clostridium botulinum Ba4 str. 657; Clostridium difficile QCD-63q42; Crocosphaera watsonii WH 8501; Cyanothece sp. ATCC 51142; Cyanothece sp. CCY0110; Cyanothece sp. PCC 7424; Cyanothece sp. PCC 7822; Exiguobacterium sibiricum 255-15; Finegoldia magna ATCC 29328; Ktedonobacter racemifer DSM 44963; Lactobacillus delbrueckii subsp. bulgaricus PB2003/044-T3-4; Lactobacillus salivarius ATCC 11741; Listeria innocua; Lyngbya sp. PCC 8106; Marinobacter sp. ELB17; Methanohalobium evestigatum Z-7303; Microcystis phage Ma-LMM01; Microcistis aeruginosa NIES-843; Microscilla marina ATCC 23134; Microcoleus chthonoplastes PCC 7420; Neisseria meningitidis; Nitrosococcus halophilus Nc4; Nocardiopsis dassonvillei subsp. dassonvillei DSM 43111; Nodularia spumigena CCY9414; Nostoc sp. PCC 7120; Oscllatoria sp. PCC 6506; Pelotomaculum_thermopropionicum_SI; Petrotoga mobilis SJ95; Polaromonas naphihalenivorans CJ2; Polaromonas sp. JS666; Pseudoalteromonas haloplanktis TAC 125; Streptomyces pristinaespiralis ATCC 25486; Streptomyces pristinaespiralis ATCC 25486; Streptococcus thermophilus; Streptomyces viridochromogenes DSM 40736; Streptosporangium roseum DSM 43021; Synechococus sp. PCC 7335; and Thermosipho africanus TCF52B (Chylinski et al., RNA Biol., 2013; 10(5): 726-737, the contents of which are incorporated herein by reference in their entirety).

[0173] In addition to Cas9 orthologs, other Cas9 variants such as fusion proteins of inactive dCas9 and effector domains with different functions may be served as a platform for genetic modulation. Any of the foregoing enzymes may be useful in the present disclosure.

[0174] Further examples of endonucleases which may be utilized in embodiments of the present disclosures are given in Table 1 and 2. These proteins may be modified before use or may be encoded in a nucleic acid sequence such as a DNA, RNA or mRNA or within a vector construct such as the plasmids or AAV vectors taught herein. Further, they may be codon optimized.

[0175] Table 1 is a non-exhaustive listing of endonucleases and protospacer adjacent motifs (PAMs). In Table 1, VP64 is an activator, m4 is a mutant endonuclease sequence, NLS is a nuclear localization signal on the C terminus (e.g., SV40 NLS). The identification number from Uniprot and the European Nucleotide Archive (ENA) databases are also provided for some endonucleases.

TABLE 1
Endonuclease orthologs and Protospacer adjacent motifs (PAMs)

| | | Protein or | | |
|---|---|---|---|---|
| | | DNA SEQ | | |
| Species | Other Name | ID NO | Source | PAM |
| Streptococcus pyogenes | SpCas9; | 1 | Uniprot ID: Q99ZW2 | NGG |
| | SpyCas9 | | | |
| Streptococcus pyogenes | SP-cas; | 2 | Esvelt; Nature Methods, vol 10, | NGG |
| | SpCas9; | | No 11, November 2013; ENA | |
| | SpyCas9 | | ID: AAK33936 | |
| Streptococcus pyogenes | SP-casm4 | 3 | Esvelt; Nature Methods, vol 10, | NGG |
| | | | No 11, November 2013 | |
| Streptococcus pyogenes | cas9-SP- | 4 | Esvelt; Nature Methods, vol 10, | NGG |
| | NLS | | No 11, November 2013 | |
| Streptococcus pyogenes | cas9- | 5 | Esvelt; Nature Methods, vol 10, | NGG |
| | SP3xNLS | | No 11, November 2013 | |
| Streptococcus pyogenes | cas9- | 6 | Esvelt; Nature Methods, vol 10, | NGG |
| | SPm4VP64 | | No 11, November 2013 | |
| Streptococcus pyogenes | cas9- | 7 | Esvelt; Nature Methods, vol 10, | NGG |
| | SPm4VP64 | | No 11, November 2013 | |
| | N | | | |
| Streptococcus | St-Cas9 | 8 | UniProt ID: G3ECR1 | NNAGAAW |
| thermophiles | | | | |
| Streptococcus | St-Cas9 | 9 | ENA ID: AEM62887 | NNAGAAW |
| thermophiles | | | | |
| Streptococcus | ST1-cas | 10 | Esvelt; Nature Methods, vol 10, | NNAGAAW |
| thermophiles | | | No 11, November 2013 | |
| Streptococcus | ST-casm4 | 11 | Esvelt; Nature Methods, vol 10, | NNAGAAW |
| thermophiles | | | No 11, November 2013 | |
| Streptococcus | cas9-ST1 | 12 | Esvelt; Nature Methods, vol 10, | NNAGAAW |
| thermophiles | | | No 11, November 2013 | |
| Streptococcus | cas9- | 13 | Esvelt; Nature Methods, vol 10, | NNAGAAW |
| thermophiles | ST13xNLS | | No 11, November 2013 | |
| Streptococcus | cas9- | 14 | Esvelt; Nature Methods, vol 10, | NNAGAAW |
| thermophiles | ST1m4VP64 | | No 11, November 2013 | |
| Streptococcus | cas9- | 15 | Esvelt; Nature Methods, vol 10, | NNAGAAW |
| thermophiles | ST1m4VP64 | | No 11, November 2013 | |
| | N | | | |
| Neisseria meningitidis | NM-cas | 16 | Esvelt; Nature Methods, vol 10, | NNNNGATT |
| | | | No 11, November 2013 | |
| Neisseria meningitidis | NM-casm4 | 17 | Esvelt; Nature Methods, vol 10, | NNNNGATT |
| | | | No 11, November 2013 | |
| Neisseria meningitidis | cas9-NM | 18 | Esvelt; Nature Methods, vol 10, | NNNNGATT |
| | | | No 11, November 2013 | |
| Neisseria meningitidis | cas9- | 19 | Esvelt; Nature Methods, vol 10, | NNNNGATT |
| | NM3xNLS | | No 11, November 2013 | |
| Neisseria meningitidis | cas9- | 20 | Esvelt; Nature Methods, vol 10, | NNNNGATT |
| | NMm4VP64 | | No 11, November 2013 | |
| Neisseria meningitidis | cas9- | 21 | Esvelt; Nature Methods, vol 10, | NNNNGATT |
| | NMm4VP64 | | No 11, November 2013 | |
| | N | | | |
| Treponema denticola | TD-cas | 22 | Esvelt; Nature Methods, vol 10, | NAAAAC |
| | | | No 11, November 2013 | |
| Treponema denticola | TD-casm4 | 23 | Esvelt; Nature Methods, vol 10, | NAAAAC |
| | | | No 11, November 2013 | |
| Streptococcus aureas | SaCas9 | 24 | UniProt ID: J7RUA5 | NNGRRT |
| Streptococcus aureas | SaCas9 | 25 | ENA ID: CCK7413 | NNGRRT |
| Francisella tularensis | cas9 | 26 | Uniprot ID: A0Q5Y3 | NGG |
| Francisella tularensis | cas9 | 27 | ENA ID: ABK89648 | NGG |
| Francisella tularensis | FnCpf1 | 28 | UniProt ID: A0Q7Q2 | TTN or YTN |
| subsp. novicida (strain | | | | |
| U112) | | | | |
| Acidaminococcus sp. | AsCpf1 | 29 | UniProt ID: U2UMQ6 | TTN or YTN |
| (strain BV3L6) | | | | |

[0176] Table 2 is a non-exhaustive listing of endonucleases. Provided in Table 2 are the strain, GI number, NCBI Reference number and the sequence identifier for the amino acid sequence.

TABLE 2
Endonuclease orthologs

| Strain | GI No. | NCBI Ref. No. | SEQ ID NO |
|---|---|---|---|
| 72 Bradyrhizobium sp. BTAil | 500990533 | WP_012044026.1 | 30 |
| 79 Candidatus Puniceispirillum marinum IMCC1322 | 502812437 | WP_013047413.1 | 31 |
| Acidaminococcus intestini RyC-MR95 | 496307041 | WP_009016219.1 | 32 |
| Acidaminococcus sp. D21 | 227824983 | ZP_03989815.1 | 33 |
| Acidothermus cellulolyticus 11B | 500040068 | WP_011720786.1 | 34 |
| Acidovorax avenae subsp. avenae ATCC 19860 | 503358116 | WP_013592777.1 | 35 |
| Acidovorax ebreus TPSY | 501844634 | WP_012655176.1 | 36 |
| Actinobacillus minor NM305 | 240949037 | ZP_04753391.1 | 37 |
| Actinobacillus pleuropneumoniae serovar 10 str. | 307256472 | ZP_07538254.1 | 38 |
| D13039 | | | |
| Actinobacillus succinogenes 130Z | 500711346 | WP_011979028.1 | 39 |
| Actinobacillus suis H91-0380 | 504804175 | WP_014991277.1 | 40 |
| Actinomyces coleocanis DSM 15436 | 227494853 | ZP_03925169.1 | 41 |
| Actinomyces georgiae F0490 | 420151340 | ZP_14658459.1 | 42 |
| Actinomyces naeslundii str. Howell 279 | 400293272 | ZP_10795148.1 | 43 |
| Actinomyces sp. ICM47 | 396585058 | ZP_10485490.1 | 44 |
| Actinomyces sp. oral taxon 175 str. F0384 | 343523232 | ZP_08760194.1 | 45 |
| Actinomyces sp. oral taxon 180 str. F0310 | 315605738 | ZP_07880770.1 | 46 |
| Actinomyces sp. oral taxon 181 str. F0379 | 429758968 | ZP_19291474.1 | 47 |
| Actinomyces sp. oral taxon 848 str. F0332 | 269219760 | ZP_06163614.1 | 48 |
| Actinomyces turicensis ACS-279-V-Col4 | 405979650 | ZP_11037993.1 | 49 |
| Akkermansia muciniphila ATCC BAA-835 | 501389468 | WP_012421034.1 | 50 |
| Alcanivorax sp. W11-5 | 407803669 | ZP_11150502.1 | 51 |
| Alicycliphilus denitrificans BC | 319760940 | YP_004124877.1 | 52 |
| Alicycliphilus denitrificans K601 | 503282466 | WP_013517127.1 | 53 |
| Alicyclobacillus hesperidum URH17-3-68 | 403744858 | ZP_10953934.1 | 54 |
| Aminomonas paucivorans DSM 12260 | 312879015 | ZP_07738815.1 | 55 |
| Anaerococcus tetradius ATCC 35098 | 227501312 | ZP_03931361.1 | 56 |
| Anaerophaga sp. HS1 | 371776944 | ZP_09483266.1 | 57 |
| Anaerophaga thermohalophila DSM 12881 | 346224232 | ZP_08845374.1 | 58 |
| Azospirillum sp. B510 | 502738540 | WP_012973524.1 | 59 |
| Bacillus cereus BAG4X12-1 | 423439645 | ZP_17416574.1 | 60 |
| Bacillus cereus BAG4X2-1 | 423445130 | ZP_17422033.1 | 61 |
| Bacillus cereus Rock1-15 | 229113166 | ZP_04242662.1 | 62 |
| Bacillus smithii 7_3_47FAA | 365156657 | ZP_09352959.1 | 63 |
| Bacillus thuringiensis serovar finitimus YBT-020 | 447027827 | WP_001105083.1 | 64 |
| Bacteroides coprophilus DSM 18228 | 224026357 | ZP_03644723.1 | 65 |
| Bacteroides coprosuis DSM 18011 | 333031006 | ZP_08459067.1 | 66 |
| Bacteroides dorei DSM 17855 | 212694363 | ZP_03302491.1 | 67 |
| Bacteroides eggerthii 1_2_48FAA | 317474201 | ZP_07933477.1 | 68 |
| Bacteroides faecis 27-5 | 380696107 | ZP_09860966.1 | 69 |
| Bacteroides fluxus YTT 12057 | 329965125 | ZP_08302094.1 | 70 |
| Bacteroides fragilis 638R | 492255239 | WP_005791619.1 | 71 |
| Bacteroides fragilis NCTC 9343 | 496648031 | WP_009293010.1 | 72 |
| Bacteroides nordii CL02T12C05 | 393788929 | ZP_10377053.1 | 73 |
| Bacteroides sp. 2_1_16 | 265767599 | ZP_06095265.1 | 74 |
| Bacteroides sp. 20_3 | 301311869 | ZP_07217791.1 | 75 |
| Bacteroides sp. 3_1_19 | 298377533 | ZP_06987485.1 | 76 |
| Bacteroides sp. D2 | 383115507 | ZP_09936263.1 | 77 |
| Bacteroides sp. D2 | 383110723 | ZP_09931542.1 | 78 |
| Bacteroides uniformis CL03T00C23 | 423303159 | ZP_17281158.1 | 79 |
| Bacteroides vulgatus CL09T03C04 | 423312075 | ZP_17290012.1 | 80 |
| Bacteroidetes oral taxon 274 str. F0058 | 298373376 | ZP_06983365.1 | 81 |
| Barnesiella intestinihominis YIT 11860 | 404487228 | ZP_11022414.1 | 82 |
| Belliella baltica DSM 15883 | 504586551 | WP_014773653.1 | 83 |
| Bergeyella zoohelcum ATCC 43767 | 423317190 | ZP_17295095.1 | 84 |
| Bergeyella zoohelcum CCUG 30536 | 406673990 | ZP_11081206.1 | 85 |
| Bifidobacterium bifidum S17 | 503128334 | WP_013362995.1 | 86 |
| Bifidobacterium dentium Bdl | 502666262 | WP_012902199.1 | 87 |
| Bifidobacterium longum DJO10A | 501448754 | WP_012472203.1 | 88 |
| Bifidobacterium longum subsp. longum 2-2B | 419852381 | ZP_14375259.1 | 89 |
| Bifidobacterium longum subsp. longum KACC 91563 | 494117278 | WP_007057059.1 | 90 |
| Bifidobacterium sp. 12_1_47BFAA | 317482066 | ZP_07941090.1 | 91 |
| Brevibacillus laterosporus GI-9 | 421874297 | ZP_16305903.1 | 92 |
| Burkholderiales bacterium 1_1_47 | 303257695 | ZP_07343707.1 | 93 |
| Caenispirillum salinarum AK4 | 427429481 | ZP_18919511.1 | 94 |
| Campylobacter coli 1098 | 419564797 | ZP_14102166.1 | 95 |
| Campylobacter coli 111-3 | 419536531 | ZP_14076011.1 | 96 |
| Campylobacter coli 132-6 | 419572019 | ZP_14108954.1 | 97 |
| Campylobacter coli 151-9 | 419603415 | ZP_14137966.1 | 98 |
| Campylobacter coli 1909 | 419576091 | ZP_14112759.1 | 99 |
| Campylobacter coli 1957 | 419581876 | ZP_14118158.1 | 100 |
| Campylobacter coli 2692 | 419553162 | ZP_14091426.1 | 101 |
| Campylobacter coli 59-2 | 419578074 | ZP_14114609.1 | 102 |
| Campylobacter coli 67-8 | 419587721 | ZP_14123627.1 | 103 |
| Campylobacter coli 80352 | 419558307 | ZP_14096178.1 | 104 |
| Campylobacter coli 80352 | 419559505 | ZP_14097234.1 | 105 |
| Campylobacter jejuni subsp. doylei 269.97 | 500764549 | WP_011990840.1 | 106 |
| Campylobacter jejuni subsp. jejuni 110-21 | 419676124 | ZP_14205367.1 | 107 |
| Campylobacter jejuni subsp. jejuni 129-258 | 419619138 | ZP_14152637.1 | 108 |
| Campylobacter jejuni subsp. jejuni 1336 | 283956897 | ZP_06374370.1 | 109 |
| Campylobacter jejuni subsp. jejuni 140-16 | 419681578 | ZP_14210407.1 | 110 |
| Campylobacter jejuni subsp. jejuni 1577 | 419685099 | ZP_14213672.1 | 111 |
| Campylobacter jejuni subsp. jejuni 1854 | 419689467 | ZP_14217734.1 | 112 |
| Campylobacter jejuni subsp. jejuni 1997-10 | 419666522 | ZP_14196520.1 | 113 |
| Campylobacter jejuni subsp. jejuni 2008-1025 | 419650041 | ZP_14181271.1 | 114 |
| Campylobacter jejuni subsp. jejuni 2008-872 | 419654778 | ZP_14185684.1 | 115 |
| Campylobacter jejuni subsp. jejuni 2008-979 | 419660762 | ZP_14191198.1 | 116 |
| Campylobacter jejuni subsp. jejuni 2008-988 | 419656328 | ZP_14187138.1 | 117 |
| Campylobacter jejuni subsp. jejuni 2008-988 | 419655317 | ZP_14186170.1 | 118 |
| Campylobacter jejuni subsp. jejuni 260.94 | 86152042 | ZP_01070255.1 | 119 |
| Campylobacter jejuni subsp. jejuni 414 | 283953849 | ZP_06371379.1 | 120 |
| Campylobacter jejuni subsp. jejuni 51037 | 419674189 | ZP_14203604.1 | 121 |
| Campylobacter jejuni subsp. jejuni 51494 | 419619463 | ZP_14152929.1 | 122 |
| Campylobacter jejuni subsp. jejuni 53161 | 419647275 | ZP_14178699.1 | 123 |
| Campylobacter jejuni subsp. jejuni 60004 | 419629136 | ZP_14161873.1 | 124 |
| Campylobacter jejuni subsp. jejuni 81116 | 500850126 | WP_012006786.1 | 125 |
| Campylobacter jejuni subsp. jejuni 84-25 | 88596565 | ZP_01099802.1 | 126 |
| Campylobacter jejuni subsp. jejuni 87459 | 419680124 | ZP_14209037.1 | 127 |
| Campylobacter jejuni subsp. jejuni ATCC 33560 | 419643715 | ZP_14175404.1 | 128 |
| Campylobacter jejuni subsp. jejuni CF93-6 | 86149266 | ZP_01067497.1 | 129 |
| Campylobacter jejuni subsp. jejuni CG8486 | 148925683 | ZP_01809371.1 | 130 |
| Campylobacter jejuni subsp. jejuni HB93-13 | 86152450 | ZP_01070655.1 | 131 |
| Campylobacter jejuni subsp. jejuni LMG 23210 | 419696801 | ZP_14224621.1 | 132 |
| Campylobacter jejuni subsp. jejuni LMG 23211 | 419697443 | ZP_14225176.1 | 133 |
| Campylobacter jejuni subsp. jejuni LMG 23263 | 419628620 | ZP_14161448.1 | 134 |
| Campylobacter jejuni subsp. jejuni LMG 23264 | 419632476 | ZP_14165011.1 | 135 |
| Campylobacter jejuni subsp. jejuni LMG 23269 | 419634246 | ZP_14166646.1 | 136 |
| Campylobacter jejuni subsp. jejuni LMG 23357 | 419641132 | ZP_14173041.1 | 137 |
| Campylobacter jejuni subsp. jejuni NCTC 11168 | 218563121 | YP_002344900.1 | 138 |
| Campylobacter jejuni subsp. jejuni NW | 424845990 | ZP_18270589.1 | 139 |
| Campylobacter jejuni subsp. jejuni PT14 | 504829395 | WP_015016497.1 | 140 |
| Campylobacter lari | 345468028 | BAK69486.1 | 141 |
| Capnocytophaga canimorsus Cc5 | 503763492 | WP_013997568.1 | 142 |
| Capnocytophaga gingivalis ATCC 33624 | 228473057 | ZP_04057814.1 | 143 |
| Capnocytophaga ochracea DSM 7271 | 506262077 | WP_015781852.1 | 144 |
| Capnocytophaga sp. CM59 | 402830627 | ZP_10879324.1 | 145 |
| Capnocytophaga sp. oral taxon 324 str. F0483 | 429756885 | ZP_19289459.1 | 146 |
| Capnocytophaga sp. oral taxon 326 str. F0382 | 429752492 | ZP_19285347.1 | 147 |
| Capnocytophaga sp. oral taxon 329 str. F0087 | 332882466 | ZP_08450086.1 | 148 |
| Capnocytophaga sp. oral taxon 335 str. F0486 | 420149252 | ZP_14656431.1 | 149 |
| Capnocytophaga sp. oral taxon 380 str. F0488 | 429748017 | ZP_19281243.1 | 150 |
| Capnocytophaga sp. oral taxon 412 str. F0487 | 393778597 | ZP_10366863.1 | 151 |
| Capnocytophaga sputigena Capno | 213962376 | ZP_03390639.1 | 152 |
| Catellicoccus marimammalium M35/04/3 | 424780480 | ZP_18207353.1 | 153 |
| Catenibacterium mitsuokai DSM 15897 | 224543312 | ZP_03683851.1 | 154 |
| Chryseobacterium sp. CF314 | 399023756 | ZP_10725810.1 | 155 |
| Clostridium cellulolyticum H10 | 506406750 | WP_015926469.1 | 156 |
| Clostridium perfringens C str. JGS1495 | 169343975 | ZP_02864966.1 | 157 |
| Clostridium perfringens D str. JGS1721 | 182624245 | ZP_02952031.1 | 158 |
| Clostridium spiroforme DSM 1552 | 169349750 | ZP_02866688.1 | 159 |
| Coprococcus catus GD/7 | 291520705 | CBK78998.1 | 160 |
| Coriobacterium glomerans PW2 | 503474914 | WP_013709575.1 | 161 |
| Corynebacterium accolens ATCC 49725 | 227502575 | ZP_03932624.1 | 162 |
| Corynebacterium accolens ATCC 49726 | 306835141 | ZP_07468181.1 | 163 |
| Corynebacterium diphtheriae 241 | 504067105 | WP_014301099.1 | 164 |
| Corynebacterium diphtheriae 31A | 504082104 | WP_014316098.1 | 165 |
| Corynebacterium diphtheriae BH8 | 504083379 | WP_014317373.1 | 166 |
| Corynebacterium diphtheriae bv. intermedius str. | 419861895 | ZP_14384519.1 | 167 |
| NCTC 5011 | | | |
| Corynebacterium diphtheriae C7 (beta) | 504084437 | WP_014318431.1 | 168 |
| Corynebacterium diphtheriae HC02 | 504085624 | WP_014319618.1 | 169 |
| Corynebacterium diphtheriae NCTC 13129 | 499236428 | WP_010933968.1 | 170 |
| Corynebacterium diphtheriae VA01 | 504077139 | WP_014311133.1 | 171 |
| Corynebacterium matruchotii ATCC 14266 | 305681510 | ZP_07404317.1 | 172 |
| Corynebacterium matruchotii ATCC 33806 | 225021644 | ZP_03710836.1 | 173 |
| Dinoroseobacter shibae DFL 12 | 501128074 | WP_012177079.1 | 174 |
| Dolosigranulum pigrum ATCC 51524 | 375088882 | ZP_09735219.1 | 175 |
| Dorea longicatena DSM 13814 | 153855454 | ZP_01996585.1 | 176 |
| Eggerthella sp. YY7918 | 503746753 | WP_013980829.1 | 177 |
| Elusimicrobium minutum Pei191 | 501382854 | WP_012414420.1 | 178 |
| Enterococcus faecalis ATCC 29200 | 229548613 | ZP_04437338.1 | 179 |
| Enterococcus faecalis ATCC 4200 | 256617555 | ZP_05474401.1 | 180 |
| Enterococcus faecalis D6 | 257086028 | ZP_05580389.1 | 181 |
| Enterococcus faecalis E1Sol | 257080914 | ZP_05575275.1 | 182 |
| Enterococcus faecalis Fly1 | 257084992 | ZP_05579353.1 | 183 |
| Enterococcus faecalis OG1RF | 384512368 | WP_002413717.1 | 184 |
| Enterococcus faecalis R508 | 424761124 | ZP_18188706.1 | 185 |
| Enterococcus faecalis T11 | 257419486 | ZP_05596480.1 | 186 |
| Enterococcus faecalis TX0012 | 315149830 | EFT93846.1 | 187 |
| Enterococcus faecalis TX0012 | 422729710 | ZP_16786108.1 | 188 |
| Enterococcus faecalis TX0470 | 312900261 | ZP_07759573.1 | 189 |
| Enterococcus faecalis TX1342 | 422701955 | ZP_16759795.1 | 190 |
| Enterococcus faecalis TX4244 | 422695652 | ZP_16753631.1 | 191 |
| Enterococcus faecium 1,141,733 | 257888853 | ZP_05668506.1 | 192 |
| Enterococcus faecium 1,231,408 | 257893735 | ZP_05673388.1 | 193 |
| Enterococcus faecium E1133 | 430847551 | ZP_19465387.1 | 194 |
| Enterococcus faecium E3083 | 431757680 | ZP_19546309.1 | 195 |
| Enterococcus faecium PC4.1 | 293379700 | ZP_06625836.1 | 196 |
| Enterococcus faecium TX1330 | 227550972 | ZP_03981021.1 | 197 |
| Enterococcus faecium TX1337RF | 424765774 | ZP_18193145.1 | 198 |
| Enterococcus hirae ATCC 9790 | 392988474 | WP_010737004.1 | 199 |
| Enterococcus italicus DSM 15952 | 315641599 | ZP_07896667.1 | 200 |
| Eubacterium dolichum DSM 3991 | 160915782 | ZP_02077990.1 | 201 |
| Eubacterium rectale ATCC 33656 | 502252724 | WP_012742555.1 | 202 |
| Eubacterium sp. AS15 | 402309258 | ZP_10828253.1 | 203 |
| Eubacterium ventriosum ATCC 27560 | 154482474 | ZP_02024922.1 | 204 |
| Eubacterium yurii subsp. margaretiae ATCC 43715 | 306821691 | ZP_07455288.1 | 205 |
| Facklamia hominis CCUG 36813 | 406671118 | ZP_11078357.1 | 206 |
| Fibrobacter succinogenes subsp. succinogenes S85 | 502574305 | WP_012819984.1 | 207 |
| Filifactor alocis ATCC 35896 | 504028100 | WP_014262094.1 | 208 |
| Finegoldia magna ACS-171-V-Col3 | 302380288 | ZP_07268759.1 | 209 |
| Finegoldia magna ATCC 29328 | 501247123 | WP_012290141.1 | 210 |
| Finegoldia magna SY403409CC001050417 | 417926052 | ZP_12569464.1 | 211 |
| Flavobacteriaceae bacterium S85 | 372210605 | ZP_09498407.1 | 212 |
| Flavobacterium branchiophilum FL-15 | 503850157 | WP_014084151.1 | 213 |
| Flavobacterium columnare ATCC 49512 | 503931814 | WP_014165808.1 | 214 |
| Flavobacterium columnare ATCC 49512 | 503930464 | WP_014164458.1 | 215 |
| Flavobacterium psychrophilum JIP02/86 | 150025575 | YP_001296401.1 | 216 |
| Fluviicola taffensis DSM 16823 | 503453227 | WP_013687888.1 | 217 |
| Francisella cf. novicida 3523 | 504361318 | WP_014548420.1 | 218 |
| Francisella cf. novicida Fx1 | 504362543 | WP_014549645.1 | 219 |
| Francisella novicida FTG | 208779141 | ZP_03246487.1 | 220 |
| Francisella novicida GA99-3548 | 254374175 | ZP_04989657.1 | 221 |
| Francisella novicida U112 | 489129153 | WP_003038941.1 | 222 |
| Francisella tularensis subsp. novicida GA99-3549 | 254372717 | ZP_04988206.1 | 223 |
| Fructobacillus fructosusKCTC 3544 | 339625081 | ZP_08660870.1 | 224 |
| Fusobacterium nucleatum subsp. vincentii ATCC | 34762592 | ZP_00143587.1 | 225 |
| 49256 | | | |
| Fusobacterium sp. 1_1_41FAA | 294782278 | ZP_06747604.1 | 226 |
| Fusobacterium sp. 3_1_27 | 294785695 | ZP_06750983.1 | 227 |
| Fusobacterium sp. 3_1_36A2 | 256845019 | ZP_05550477.1 | 228 |
| Galbibacter sp. ck-I2-15 | 408370397 | ZP_11168174.1 | 229 |
| gamma proteobacterium HdN1 | 503028472 | WP_013263448.1 | 230 |
| gamma proteobacterium HTCC5015 | 254447899 | ZP_05061364.1 | 231 |
| Gardnerella vaginalis 1500E | 415717744 | ZP_11466979.1 | 232 |
| Gardnerella vaginalis 284V | 415703177 | ZP_11459085.1 | 233 |
| Gardnerella vaginalis 5-1 | 298252606 | ZP_06976400.1 | 234 |
| Gemella haemolysans ATCC 10379 | 241889924 | ZP_04777222.1 | 235 |
| Gemella morbillorum M424 | 317495358 | ZP_07953728.1 | 236 |
| Gluconacetobacter diazotrophicus PA1 5 | 209542524 | WP_012553074.1 | 237 |
| Gluconacetobacter diazotrophicus PA1 5 | 501182811 | WP_012225906.1 | 238 |
| Gordonibacter pamelaeae 7-10-1-b | 295106015 | CBL03558.1 | 239 |
| Haemophilus parainfluenzae ATCC 33392 | 325578067 | ZP_08148261.1 | 240 |
| Haemophilus parainfluenzae CCUG 13788 | 359298684 | ZP_09184523.1 | 241 |
| Haemophilus parainfluenzae T3T1 | 503831578 | WP_014065572.1 | 242 |
| Haemophilus sputorum HK 2154 | 402304649 | ZP_10823715.1 | 243 |
| Helcococcus kunzii ATCC 51366 | 375092427 | ZP_09738707.1 | 244 |
| Helicobacter canadensis MIT 98-5491 | 253828136 | ZP_04871021.1 | 245 |
| Helicobacter cinaedi ATCC BAA-847 | 396079277 | BAM32653.1 | 246 |
| Helicobacter cinaedi CCUG 18818 | 313144862 | ZP_07807055.1 | 247 |
| Helicobacter cinaedi PAGU611 | 504479905 | WP_014667007.1 | 248 |
| Helicobacter mustelae 12198 | 502787413 | WP_013022389.1 | 249 |
| Ignavibacterium album JCM 16511 | 504374771 | WP_014561873.1 | 250 |
| Ilyobacter polytropus DSM 2926 | 503154365 | WP_013389026.1 | 251 |
| Indibacter alkaliphilus LW1 | 404451234 | ZP_11016204.1 | 252 |
| Joostella marina DSM 19592 | 386818981 | ZP_10106197.1 | 253 |
| Kingella kingae PYKK081 | 381401699 | ZP_09926592.1 | 254 |
| Kordia algicida OT-1 | 163754820 | ZP_02161941.1 | 255 |
| Lactobacillus animalis KCTC 3501 | 335357451 | ZP_08549321.1 | 256 |
| Lactobacillus brevis subsp. gravesensis ATCC 27305 | 227509761 | ZP_03939810.1 | 257 |
| Lactobacillus buchneri CD034 | 504753359 | WP_014940461.1 | 258 |
| Lactobacillus buchneri NRRL B-30929 | 503493991 | WP_013728652.1 | 259 |
| Lactobacillus casei BL23 | 191639137 | YP_001988303.1 | 260 |
| Lactobacillus casei Lc-10 | 418010298 | ZP_12650076.1 | 261 |
| Lactobacillus casei M36 | 417996992 | ZP_12637259.1 | 262 |
| Lactobacillus casei str. Zhang | 501468426 | WP_012491871.1 | 263 |
| Lactobacillus casei T71499 | 417999832 | ZP_12640037.1 | 264 |
| Lactobacillus casei UCD174 | 418002962 | ZP_12643066.1 | 265 |
| Lactobacillus casei W56 | 504765121 | WP_014952223.1 | 266 |
| Lactobacillus coryniformis subsp. coryniformis | 333394446 | ZP_08476265.1 | 267 |
| KCTC 3167 | | | |
| Lactobacillus coryniformis subsp. torquens KCTC | 336393381 | ZP_08574780.1 | 268 |
| 3535 | | | |
| Lactobacillus curvatus CRL 705 | 354808135 | ZP_09041575.1 | 269 |
| Lactobacillus farciminis KCTC 3681 | 336394701 | ZP_08576100.1 | 270 |
| Lactobacillus farciminis KCTC 3681 | 336394882 | ZP_08576281.1 | 271 |
| Lactobacillus fermentum 28-3-CHN | 260662220 | ZP_05863116.1 | 272 |
| Lactobacillus fermentum ATCC 14931 | 227514633 | ZP_03944682.1 | 273 |
| Lactobacillus florum 2F | 408790128 | ZP_11201760.1 | 274 |
| Lactobacillus gasseri JV-V03 | 300361537 | ZP_07057714.1 | 275 |
| Lactobacillus hominis CRBIP 24.179 | 395244248 | ZP_10421219.1 | 276 |
| Lactobacillus iners LactinV 11V1-d | 309803917 | ZP_07698001.1 | 277 |
| Lactobacillus jensenii 269-3 | 238854567 | ZP_04644902.1 | 278 |
| Lactobacillus jensenii 27-2-CHN | 256852176 | ZP_05557562.1 | 279 |
| Lactobacillus johnsonii DPC 6026 | 504380459 | WP_014567561.1 | 280 |
| Lactobacillus mucosae LM1 | 377831443 | ZP_09814419.1 | 281 |
| Lactobacillus paracasei subsp. paracasei 8700:2 | 239630053 | ZP_04673084.1 | 282 |
| Lactobacillus pentosus IG1 | 339637353 | CCC16263.1 | 283 |
| Lactobacillus pentosus KCA1 | 392947436 | ZP_10313071.1 | 284 |
| Lactobacillus pentosus MP-10 | 334881121 | CCB81940.1 | 285 |
| Lactobacillus plantarum ZJ316 | 505192536 | WP_015379638.1 | 286 |
| Lactobacillus rhamnosus GG | 504382875 | WP_014569977.1 | 287 |
| Lactobacillus rhamnosus HN001 | 199597394 | ZP_03210824.1 | 288 |
| Lactobacillus rhamnosus R0011 | 418072660 | ZP_12709930.1 | 289 |
| Lactobacillus ruminis ATCC 25644 | 323340068 | ZP_08080334.1 | 290 |
| Lactobacillus salivarius SMXD51 | 418960525 | ZP_13512412.1 | 291 |
| Lactobacillus sanfranciscensis TMW 1.1304 | 503848134 | WP_014082128.1 | 292 |
| Lactobacillus sp. 66c | 408410332 | ZP_11181557.1 | 293 |
| Lactobacillus versmoldensis KCTC 3814 | 365906066 | ZP_09443825.1 | 294 |
| Legionella pneumophila 130b | 307608922 | CBW98322.1 | 295 |
| Legionella pneumophila str. Paris | 499526152 | WP_011212792.1 | 296 |
| Leuconostoc gelidum KCTC 3527 | 333398273 | ZP_08480086.1 | 297 |
| Listeria innocua ATCC 33091 | 423101383 | ZP_17089087.1 | 298 |
| Listeria innocua Clip11262 | 16801805 | WP_010991369.1 | 299 |
| Listeria monocytogenes 10403S | 386044902 | WP_014601172.1 | 300 |
| Listeria monocytogenes FSL JI-194 | 254825045 | ZP_05230046.1 | 301 |
| Listeria monocytogenes FSL J1-208 | 422810631 | ZP_16859042.1 | 302 |
| Listeria monocytogenes FSL N3-165 | 254829042 | ZP_05233729.1 | 303 |
| Listeria monocytogenes FSL R2-503 | 254854201 | ZP_05243549.1 | 304 |
| Listeria monocytogenes str. 1/2a F6854 | 47097148 | ZP_00234715.1 | 305 |
| Listeriaceae bacterium TTU M1-001 | 381184145 | ZP_09892805.1 | 306 |
| Marinilabilia sp. AK2 | 410030899 | ZP_11280729.1 | 307 |
| Megasphaera sp. UPII 135-E | 342218215 | ZP_08710837.1 | 308 |
| Methylocystis sp. ATCC 49242 | 323139312 | ZP_08074365.1 | 309 |
| Methylosinus trichosporium OB3b | 296446027 | ZP_06887976.1 | 310 |
| Mobiluncus curtisii subsp. holmesii ATCC 35242 | 315656340 | ZP_07909231.1 | 311 |
| Mobiluncus mulieris 28-1 | 269977848 | ZP_06184804.1 | 312 |
| Mobiluncus mulieris FB024-16 | 307700167 | ZP_07637211.1 | 313 |
| Mucilaginibacter paludis DSM 18603 | 373954054 | ZP_09614014.1 | 314 |
| Mycoplasma canis PG 14 | 384393286 | EIE39736.1 | 315 |
| Mycoplasma canis PG 14 | 419703974 | ZP_14231525.1 | 316 |
| Mycoplasma canis UF31 | 384937953 | ZP_10029646.1 | 317 |
| Mycoplasma canis UF33 | 419704625 | ZP_14232170.1 | 318 |
| Mycoplasma canis UFG1 | 419705269 | ZP_14232808.1 | 319 |
| Mycoplasma canis UFG4 | 419705920 | ZP_14233452.1 | 320 |
| Mycoplasma cynos C142 | 505100601 | WP_015287703.1 | 321 |
| Mycoplasma gallisepticum NC95_13295-2-2P | 504699247 | WP_014886349.1 | 322 |
| Mycoplasma gallisepticum NY01_2001.047-5-1P | 504699352 | WP_014886454.1 | 323 |
| Mycoplasma gallisepticum str. F | 504387687 | WP_014574789.1 | 324 |
| Mycoplasma gallisepticum str. F | 284931710 | ADC31648.1 | 325 |
| Mycoplasma gallisepticum str. R(low) | 499426471 | WP_011113935.1 | 326 |
| Mycoplasma mobile 163K | 499583770 | WP_011264553.1 | 327 |
| Mycoplasma ovipneumoniae SC01 | 363542550 | ZP_09312133.1 | 328 |
| Mycoplasma synoviae 53 | 499602984 | WP_011283718.1 | 329 |
| Mycoplasma synoviae 53 | 144575181 | AAZ43989.2 | 330 |
| Myroides injenensis M09-0166 | 399927444 | ZP_10784802.1 | 331 |
| Myroides odoratus DSM 2801 | 374597806 | ZP_09670808.1 | 332 |
| Neisseria bacilliformis ATCC BAA-1200 | 329117879 | ZP_08246593.1 | 333 |
| Neisseria cinerea ATCC 14685 | 261378287 | ZP_05982860.1 | 334 |
| Neisseria flavescens SK114 | 241759613 | ZP_04757714.1 | 335 |
| Neisseria lactamica 020-06 | 503214802 | WP_013449463.1 | 336 |
| Neisseria meningitidis 053442 | 501178069 | WP_012221298.1 | 337 |
| Neisseria meningitidis 2007056 | 433531983 | ZP_20488550.1 | 338 |
| Neisseria meningitidis 63049 | 433514137 | ZP_20470921.1 | 339 |
| Neisseria meningitidis 8013 | 504387108 | WP_014574210.1 | 340 |
| Neisseria meningitidis 92045 | 421559784 | ZP_16005652.1 | 341 |
| Neisseria meningitidis 93003 | 421538794 | ZP_15984966.1 | 342 |
| Neisseria meningitidis 93004 | 421541126 | ZP_15987256.1 | 343 |
| Neisseria meningitidis 96023 | 433518260 | ZP_20475000.1 | 344 |
| Neisseria meningitidis 98008 | 421555531 | ZP_16001461.1 | 345 |
| Neisseria meningitidis alpha14 | 254804356 | WP_015815286.1 | 346 |
| Neisseria meningitidis alpha275 | 254672046 | CBA04630.1 | 347 |
| Neisseria meningitidis ATCC 13091 | 304388355 | ZP_07370468.1 | 348 |
| Neisseria meningitidis N1568 | 416164244 | ZP_11607176.1 | 349 |
| Neisseria meningitidis NM140 | 421545139 | ZP_15991204.1 | 350 |
| Neisseria meningitidis NM220 | 418291220 | ZP_12903258.1 | 351 |
| Neisseria meningitidis NM233 | 418288950 | ZP_12901357.1 | 352 |
| Neisseria meningitidis WUE 2594 | 488175202 | WP_002246410.1 | 353 |
| Neisseria meningitidis Z2491 | 488163954 | WP_002235162.1 | 354 |
| Neisseria sp. oral taxon 14 str. F0314 | 298369677 | ZP_06980994.1 | 355 |
| Neisseria wadsworthii 9715 | 350570326 | ZP_08938692.1 | 356 |
| Niabella soli DSM 19437 | 374372722 | ZP_09630384.1 | 357 |
| Nitratifractor salsuginis DSM 16511 | 503319748 | WP_013554409.1 | 358 |
| Nitrobacter hamburgensis X14 | 499824283 | WP_011505017.1 | 359 |
| Nitrosomonas sp. AL212 | 503414024 | WP_013648685.1 | 360 |
| Odoribacter laneus YIT 12061 | 374384763 | ZP_09642280.1 | 361 |
| Oenococcus kitaharae DSM 17330 | 372325145 | ZP_09519734.1 | 362 |
| Oenococcus kitaharae DSM 17330 | 366983953 | EHN59352.1 | 363 |
| Olsenella uli DSM 7084 | 503017123 | WP_013252099.1 | 364 |
| Ornithobacterium rhinotracheale DSM 15997 | 504604717 | WP_014791819.1 | 365 |
| Parabacteroides johnsonii DSM 18315 | 218258638 | ZP_03474966.1 | 366 |
| Parabacteroides sp. D13 | 256840409 | ZP_05545917.1 | 367 |
| Parasutterella excrementihominis YIT 11859 | 331001027 | ZP_08324662.1 | 368 |
| Parvibaculum lavamentivorans DS-1 | 500777975 | WP_011995013.1 | 369 |
| Pasteurella multocida subsp. gallicida X73 | 425063822 | ZP_18466947.1 | 370 |
| Pasteurella multocida subsp. multocida str. P52VAC | 421263876 | ZP_15714893.1 | 371 |
| Pasteurella multocida subsp. multocida str. Pm70 | 499209493 | WP_010907033.1 | 372 |
| Pediococcus acidilactici DSM 20284 | 304386254 | ZP_07368587.1 | 373 |
| Pediococcus acidilactici MA18/5M | 418068659 | ZP_12705941.1 | 374 |
| Peptoniphilus duerdenii ATCC BAA-1640 | 304438954 | ZP_07398877.1 | 375 |
| Phascolarctobacterium succinatutens YIT 12067 | 323142435 | ZP_08077256.1 | 376 |
| Planococcus antarcticus DSM 14505 | 389815359 | ZP_10206685.1 | 377 |
| Porphyromonas sp. oral taxon 279 str. F0450 | 402847315 | ZP_10895610.1 | 378 |
| Prevotella bivia JCVIHMP010 | 282858617 | ZP_06267779.1 | 379 |
| Prevotella buccae ATCC 33574 | 315607525 | ZP_07882520.1 | 380 |
| Prevotella buccalis ATCC 35310 | 282878504 | ZP_06287286.1 | 381 |
| Prevotella denticola CRIS 18C-A | 325859619 | ZP_08172752.1 | 382 |
| Prevotella histicola F0411 | 357042839 | ZP_09104541.1 | 383 |
| Prevotella intermedia 17 | 504521832 | WP_014708934.1 | 384 |
| Prevotella micans F0438 | 373501184 | ZP_09591549.1 | 385 |
| Prevotella nigrescens ATCC 33563 | 340351024 | ZP_08673992.1 | 386 |
| Prevotella nigrescens F0103 | 445119230 | ZP_21379155.1 | 387 |
| Prevotella oralis ATCC 33269 | 323344874 | ZP_08085098.1 | 388 |
| Prevotella ruminicola 23 | 502828855 | WP_013063831.1 | 389 |
| Prevotella sp. C561 | 345885718 | ZP_08837074.1 | 390 |
| Prevotella sp. MSX73 | 402307189 | ZP_10826216.1 | 391 |
| Prevotella sp. oral taxon 306 str. F0472 | 383811446 | ZP_09966911.1 | 392 |
| Prevotella stercorea DSM 18206 | 359406728 | ZP_09199391.1 | 393 |
| Prevotella tannerae ATCC 51259 | 258648111 | ZP_05735580.1 | 394 |
| Prevotella timonensis CRIS 5C-B1 | 282881485 | ZP_06290156.1 | 395 |
| Prevotella timonensis CRIS 5C-B1 | 282880052 | ZP_06288774.1 | 396 |
| Prevotella veroralis F0319 | 260592128 | ZP_05857586.1 | 397 |
| Ralstonia syzygii R24 | 344171927 | CCA84553.1 | 398 |
| Rhodopseudomonas palustris BisB18 | 499794158 | WP_011474892.1 | 399 |
| Rhodopseudomonas palustris BisB5 | 499820718 | WP_011501452.1 | 400 |
| Rhodospirillum rubrum ATCC 11170 | 83591793 | YP_425545.1 | 401 |
| Rhodovulum sp. PH10 | 402849997 | ZP_10898214.1 | 402 |
| Riemerella anatipestifer RA-CH-1 | 504750935 | WP_014938037.1 | 403 |
| Riemerella anatipestifer RA-GD | 491056565 | WP_004918207.1 | 404 |
| Roseburia intestinalis L1-82 | 257413184 | ZP_04742247.2 | 405 |
| Roseburia intestinalis M50/1 | 291537230 | CBL10342.1 | 406 |
| Roseburia inulinivorans DSM 16841 | 225377804 | ZP_03755025.1 | 407 |
| Ruminococcus albus 8 | 325677756 | ZP_08157403.1 | 408 |
| Ruminococcus lactaris ATCC 29176 | 197301447 | ZP_03166527.1 | 409 |
| Scardovia wiggsiae F0424 | 423349694 | ZP_17327350.1 | 410 |
| Scardovia inopinata F0304 | 294790575 | ZP_06755733.1 | 411 |
| Simonsiella muelleri ATCC 29453 | 404379108 | ZP_10984177.1 | 412 |
| Solobacterium moorei F0204 | 320528778 | ZP_08029929.1 | 413 |
| Sphaerochaeta globus str. Buddy | 503373188 | WP_013607849.1 | 414 |
| Sphingobacterium spiritivorum ATCC 33861 | 300771242 | ZP_07081118.1 | 415 |
| Sphingobium sp. AP49 | 398385143 | ZP_10543169.1 | 416 |
| Sphingomonas sp. S17 | 332188827 | ZP_08390536.1 | 417 |
| Sporolactobacillus vineae DSM 21990 = SL153 | 404330915 | ZP_10971363.1 | 418 |
| Staphylococcus aureus subsp. aureus | 403411236 | CCK74173.1 | 419 |
| Staphylococcus lugdunensis M23590 | 315659848 | ZP_07912707.1 | 420 |
| Staphylococcus pseudintermedius ED99 | 504426157 | WP_014613259.1 | 421 |
| Staphylococcus pseudintermedius ED99 | 323463801 | ADX75954.1 | 422 |
| Staphylococcus simulans ACS-120-V-Sch1 | 414160476 | ZP_11416743.1 | 423 |
| Streptococcus agalactiae 2603V/R | 22537057 | NP_687908.1 | 424 |
| Streptococcus agalactiae 515 | 77413160 | ZP_00789359.1 | 425 |
| Streptococcus agalactiae A909 | 446962831 | WP_001040087.1 | 426 |
| Streptococcus agalactiae ATCC 13813 | 339301617 | ZP_08650712.1 | 427 |
| Streptococcus agalactiae CJB111 | 77411010 | ZP_00787365.1 | 428 |
| Streptococcus agalactiae COH1 | 77407964 | ZP_00784714.1 | 429 |
| Streptococcus agalactiae FSL S3-026 | 417005168 | ZP_11943761.1 | 430 |
| Streptococcus agalactiae GB00112 | 421147428 | ZP_15607118.1 | 431 |
| Streptococcus agalactiae H36B | 77405721 | ZP_00782807.1 | 432 |
| Streptococcus agalactiae NEM316 | 446962847 | WP_001040103.1 | 433 |
| Streptococcus agalactiae SA20-06 | 504871421 | WP_015058523.1 | 434 |
| Streptococcus agalactiae STIR-CD-17 | 421532069 | ZP_15978441.1 | 435 |
| Streptococcus anginosus 1_2_62CV | 319939170 | ZP_08013534.1 | 436 |
| Streptococcus anginosus F0211 | 315223162 | ZP_07865023.1 | 437 |
| Streptococcus anginosus SK1138 | 421490579 | ZP_15937951.1 | 438 |
| Streptococcus anginosus SK52 = DSM 20563 | 335031483 | ZP_08524916.1 | 439 |
| Streptococcus bovis ATCC 700338 | 306833855 | ZP_07466980.1 | 440 |
| Streptococcus canis FSL Z3-227 | 392329410 | ZP_10274026.1 | 441 |
| Streptococcus constellatus subsp. constellatus SK53 | 418965022 | ZP_13516809.1 | 442 |
| Streptococcus dysgalactiae subsp. equisimilis AC- | 410494913 | WP_015057649.1 | 443 |
| 2713 | | | |
| Streptococcus dysgalactiae subsp. equisimilis ATCC | 504425231 | WP_014612333.1 | 444 |
| 12394 | | | |
| Streptococcus dysgalactiae subsp. equisimilis | 502337426 | WP_012767106.1 | 445 |
| GGS_124 | | | |
| Streptococcus dysgalactiae subsp. equisimilis RE378 | 408401787 | WP_015017095.1 | 446 |
| Streptococcus equi subsp. zooepidemicus | 195978435 | WP_012515931.1 | 447 |
| MGCS10565 | | | |
| Streptococcus equinus ATCC 9812 | 320547102 | ZP_08041398.1 | 448 |
| Streptococcus gallolyticus subsp. gallolyticus ATCC | 497540342 | WP_009854540.1 | 449 |
| BAA-2069 | | | |
| Streptococcus gallolyticus subsp. gallolyticus | 306831733 | ZP_07464890.1 | 450 |
| TX20005 | | | |
| Streptococcus gallolyticus UCN34 | 502727190 | WP_012962174.1 | 451 |
| Streptococcus gallolyticus UCN34 | 502727185 | WP_012962169.1 | 452 |
| Streptococcus gordonii str. Challis substr. CH1 | 157150687 | WP_012130469.1 | 453 |
| Streptococcus infantarius ATCC BAA-102 | 171779984 | ZP_02920888.1 | 454 |
| Streptococcus infantarius subsp. infantarius CJ18 | 504100992 | WP_014334983.1 | 455 |
| Streptococcus iniae 9117 | 406658208 | ZP_11066348.1 | 456 |
| Streptococcus macacae NCTC 11558 | 357636406 | ZP_09134281.1 | 457 |
| Streptococcus macedonicus ACA-DC 198 | 504060913 | WP_014294907.1 | 458 |
| Streptococcus mitis ATCC 6249 | 306829274 | ZP_07462464.1 | 459 |
| Streptococcus mitis SK321 | 307710946 | ZP_07647371.1 | 460 |
| Streptococcus mutans 11SSST2 | 449165720 | EMB68700.1 | 461 |
| Streptococcus mutans 11SSST2 | 449951835 | ZP_21808822.1 | 462 |
| Streptococcus mutans 11VS1 | 449976542 | ZP_21816259.1 | 463 |
| Streptococcus mutans 14D | 450149988 | ZP_21876385.1 | 464 |
| Streptococcus mutans 15VF2 | 449170557 | EMB73257.1 | 465 |
| Streptococcus mutans 15VF2 | 449965974 | ZP_21812137.1 | 466 |
| Streptococcus mutans 1SM1 | 449158457 | EMB61872.1 | 467 |
| Streptococcus mutans 1SM1 | 449920643 | ZP_21798589.1 | 468 |
| Streptococcus mutans 24 | 449247589 | EMC45865.1 | 469 |
| Streptococcus mutans 24 | 450180942 | ZP_21887525.1 | 470 |
| Streptococcus mutans 2VS1 | 449174812 | EMB77280.1 | 471 |
| Streptococcus mutans 2VS1 | 449968746 | ZP_21812810.1 | 472 |
| Streptococcus mutans 3SN1 | 449162653 | EMB65780.1 | 473 |
| Streptococcus mutans 3SN1 | 449931425 | ZP_21802366.1 | 474 |
| Streptococcus mutans 4SM1 | 449159838 | EMB63138.1 | 475 |
| Streptococcus mutans 4SM1 | 449927152 | ZP_21801094.1 | 476 |
| Streptococcus mutans 4VF1 | 449167132 | EMB70037.1 | 477 |
| Streptococcus mutans 4VF1 | 449961027 | ZP_21810754.1 | 478 |
| Streptococcus mutans 5SM3 | 449176693 | EMB79025.1 | 479 |
| Streptococcus mutans 5SM3 | 449980571 | ZP_21817280.1 | 480 |
| Streptococcus mutans 66-2A | 449240165 | EMC38854.1 | 481 |
| Streptococcus mutans 66-2A | 450160342 | ZP_21879935.1 | 482 |
| Streptococcus mutans 8ID3 | 449154769 | EMB58325.1 | 483 |
| Streptococcus mutans 8ID3 | 449872064 | ZP_21781351.1 | 484 |
| Streptococcus mutans A19 | 449187668 | EMB89435.1 | 485 |
| Streptococcus mutans A19 | 450013175 | ZP_21829913.1 | 486 |
| Streptococcus mutans B | 450166294 | ZP_21882263.1 | 487 |
| Streptococcus mutans G123 | 450029806 | ZP_21832884.1 | 488 |
| Streptococcus mutans GS-5 | 488208651 | WP_002279859.1 | 489 |
| Streptococcus mutans LJ23 | 504490807 | WP_014677909.1 | 490 |
| Streptococcus mutans M21 | 449194333 | EMB95692.1 | 491 |
| Streptococcus mutans M21 | 450036249 | ZP_21835412.1 | 492 |
| Streptococcus mutans M230 | 449260994 | EMC58483.1 | 493 |
| Streptococcus mutans M230 | 449903532 | ZP_21792176.1 | 494 |
| Streptococcus mutans M2A | 449209586 | EMC10100.1 | 495 |
| Streptococcus mutans M2A | 450074072 | ZP_21849235.1 | 496 |
| Streptococcus mutans N29 | 449182997 | EMB84997.1 | 497 |
| Streptococcus mutans N29 | 450003067 | ZP_21826084.1 | 498 |
| Streptococcus mutans N3209 | 449210660 | EMC11099.1 | 499 |
| Streptococcus mutans N3209 | 450077860 | ZP_21850689.1 | 500 |
| Streptococcus mutans N66 | 449212466 | EMC12833.1 | 501 |
| Streptococcus mutans N66 | 450083993 | ZP_21853156.1 | 502 |
| Streptococcus mutans NFSM1 | 449202104 | EMC03050.1 | 503 |
| Streptococcus mutans NFSM1 | 450051112 | ZP_21840661.1 | 504 |
| Streptococcus mutans NLML1 | 450140393 | ZP_21872901.1 | 505 |
| Streptococcus mutans NLML4 | 449202681 | EMC03581.1 | 506 |
| Streptococcus mutans NLML4 | 450059882 | ZP_21843564.1 | 507 |
| Streptococcus mutans NLML5 | 449203378 | EMC04242.1 | 508 |
| Streptococcus mutans NLML5 | 450064617 | ZP_21845425.1 | 509 |
| Streptococcus mutans NLML8 | 449151037 | EMB54782.1 | 510 |
| Streptococcus mutans NLML8 | 450133520 | ZP_21870663.1 | 511 |
| Streptococcus mutans NLML9 | 449209148 | EMC09685.1 | 512 |
| Streptococcus mutans NLML9 | 450066176 | ZP_21845833.1 | 513 |
| Streptococcus mutans NMT4863 | 449186850 | EMB88660.1 | 514 |
| Streptococcus mutans NMT4863 | 450007078 | ZP_21827582.1 | 515 |
| Streptococcus mutans NN2025 | 502762704 | WP_012997688.1 | 516 |
| Streptococcus mutans NV1996 | 450086338 | ZP_21853591.1 | 517 |
| Streptococcus mutans NVAB | 449181424 | EMB83523.1 | 518 |
| Streptococcus mutans NVAB | 449990810 | ZP_21821726.1 | 519 |
| Streptococcus mutans R221 | 449258042 | EMC55644.1 | 520 |
| Streptococcus mutans R221 | 449899675 | ZP_21791159.1 | 521 |
| Streptococcus mutans S1B | 449251227 | EMC49247.1 | 522 |
| Streptococcus mutans S1B | 449877120 | ZP_21783133.1 | 523 |
| Streptococcus mutans SF1 | 450098705 | ZP_21858128.1 | 524 |
| Streptococcus mutans SF14 | 449221374 | EMC21157.1 | 525 |
| Streptococcus mutans SF14 | 450107816 | ZP_21861188.1 | 526 |
| Streptococcus mutans SM1 | 449245264 | EMC43607.1 | 527 |
| Streptococcus mutans SM1 | 450176410 | ZP_21885778.1 | 528 |
| Streptococcus mutans SM4 | 449246010 | EMC44327.1 | 529 |
| Streptococcus mutans SM4 | 450170248 | ZP_21883419.1 | 530 |
| Streptococcus mutans SM6 | 449223000 | EMC22710.1 | 531 |
| Streptococcus mutans SM6 | 450112022 | ZP_21863007.1 | 532 |
| Streptococcus mutans ST1 | 449228751 | EMC28103.1 | 533 |
| Streptococcus mutans ST1 | 450114718 | ZP_21863466.1 | 534 |
| Streptococcus mutans ST6 | 449227252 | EMC26687.1 | 535 |
| Streptococcus mutans ST6 | 450123011 | ZP_21867014.1 | 536 |
| Streptococcus mutans U2A | 449232458 | EMC31572.1 | 537 |
| Streptococcus mutans U2A | 450125471 | ZP_21867675.1 | 538 |
| Streptococcus mutans UA159 | 24379809 | NP_721764.1 | 539 |
| Streptococcus mutans W6 | 450094364 | ZP_21857006.1 | 540 |
| Streptococcus oralis SK1074 | 418974877 | ZP_13522786.1 | 541 |
| Streptococcus oralis SK304 | 421488030 | ZP_15935426.1 | 542 |
| Streptococcus oralis SK313 | 417940002 | ZP_12583290.1 | 543 |
| Streptococcus oralis SK610 | 419782534 | ZP_14308334.1 | 544 |
| Streptococcus parasanguinis F0449 | 419799964 | ZP_14325278.1 | 545 |
| Streptococcus pasteurianus ATCC 43144 | 503617972 | WP_013852048.1 | 546 |
| Streptococcus pseudoporcinus LQ 940-04 | 416852857 | ZP_11910002.1 | 547 |
| Streptococcus pyogenes MGAS10270 | 94543903 | ABF33951.1 | 548 |
| Streptococcus pyogenes MGAS10750 | 499847849 | WP_011528583.1 | 549 |
| Streptococcus pyogenes MGAS15252 | 504220439 | WP_014407541.1 | 550 |
| Streptococcus pyogenes MGAS2096 | 489080018 | WP_002989955.1 | 551 |
| Streptococcus pyogenes MGAS315 | 499366838 | WP_011054416.1 | 552 |
| Streptococcus pyogenes MGAS5005 | 499604772 | WP_011285506.1 | 553 |
| Streptococcus pyogenes MGAS6180 | 499604011 | WP_011284745.1 | 554 |
| Streptococcus pyogenes MGAS9429 | 499846885 | WP_011527619.1 | 555 |
| Streptococcus pyogenes NZ131 | 501556167 | WP_012560673.1 | 556 |
| Streptococcus pyogenes SF370 (M1 GAS) | 13622193 | AAK33936.1 | 557 |
| Streptococcus pyogenes SSI-1 | 499366838 | WP_011054416.1 | 558 |
| Streptococcus ratti FA-1 = DSM 20564 | 400290495 | ZP_10792522.1 | 559 |
| Streptococcus salivarius JIM8777 | 504447093 | WP_014634195.1 | 560 |
| Streptococcus salivarius K12 | 421452908 | ZP_15902264.1 | 561 |
| Streptococcus salivarius PS4 | 419707401 | ZP_14234885.1 | 562 |
| Streptococcus sanguinis SK115 | 422848603 | ZP_16895279.1 | 563 |
| Streptococcus sanguinis SK330 | 422860049 | ZP_16906693.1 | 564 |
| Streptococcus sanguinis SK353 | 422821159 | ZP_16869352.1 | 565 |
| Streptococcus sanguinis SK49 | 422884106 | ZP_16930555.1 | 566 |
| Streptococcus sp. BS35b | 401684660 | ZP_10816536.1 | 567 |
| Streptococcus sp. C150 | 322372617 | ZP_08047153.1 | 568 |
| Streptococcus sp. C300 | 322375978 | ZP_08050488.1 | 569 |
| Streptococcus sp. F0441 | 414157437 | ZP_11413735.1 | 570 |
| Streptococcus sp. GMD6S | 406576934 | ZP_11052556.1 | 571 |
| Streptococcus sp. M334 | 322378004 | ZP_08052491.1 | 572 |
| Streptococcus sp. oral taxon 56 str. F0418 | 339640839 | ZP_08662283.1 | 573 |
| Streptococcus sp. oral taxon 71 str. 73H25AP | 306826314 | ZP_07459648.1 | 574 |
| Streptococcus suis 89/1591 | 223932525 | ZP_03624526.1 | 575 |
| Streptococcus suis D9 | 504449965 | WP_014637067.1 | 576 |
| Streptococcus suis ST1 | 504548968 | WP_014736070.1 | 577 |
| Streptococcus suis ST3 | 489025190 | WP_002935602.1 | 578 |
| Streptococcus thermophilus | 343794781 | AEM62887.1 | 579 |
| Streptococcus thermophilus CNRZ1066 | 499546245 | WP_011227028.1 | 580 |
| Streptococcus thermophilus JIM 8232 | 504434277 | WP_014621379.1 | 581 |
| Streptococcus thermophilus LMD-9 | 500000752 | WP_011681470.1 | 582 |
| Streptococcus thermophilus LMD-9 | 500000239 | WP_011680957.1 | 583 |
| Streptococcus thermophilus LMG 18311 | 499544942 | WP_011225725.1 | 584 |
| Streptococcus thermophilus MN-ZLW-002 | 504540549 | WP_014727651.1 | 585 |
| Streptococcus thermophilus MN-ZLW-002 | 504540286 | WP_014727388.1 | 586 |
| Streptococcus thermophilus MTCC 5460 | 445374534 | ZP_21426414.1 | 587 |
| Streptococcus thermophilus ND03 | 504421032 | WP_014608134.1 | 588 |
| Streptococcus thermophilus ND03 | 504421493 | WP_014608595.1 | 589 |
| Streptococcus vestibularis ATCC 49124 | 322517104 | ZP_08069989.1 | 590 |
| Subdoligranulum sp. 4_3_54A2FAA | 365132400 | ZP_09342166.1 | 591 |
| Sutterella wadsworthensis 3_1_45B | 319941583 | ZP_08015909.1 | 592 |
| Tistrella mobilis KA081020-065 | 504561015 | WP_014748117.1 | 593 |
| Treponema denticola AL-2 | 449103686 | ZP_21740430.1 | 594 |
| Treponema denticola ASLM | 449106292 | ZP_21742960.1 | 595 |
| Treponema denticola ATCC 35405 | 42525843 | NP_970941.1 | 596 |
| Treponema denticola H1-T | 449118593 | ZP_21754998.1 | 597 |
| Treponema denticola H-22 | 449117322 | ZP_21753764.1 | 598 |
| Treponema denticola OTK | 449125136 | ZP_21761452.1 | 599 |
| Treponema denticola SP37 | 449130155 | ZP_21766379.1 | 600 |
| Treponema sp. JC4 | 384109266 | ZP_10010146.1 | 601 |
| uncultured delta proteobacterium HF0070_07E19 | 297182908 | ADI19058.1 | 602 |
| uncultured Termite group 1 bacterium phylotype Rs- | 189485059 | YP_001956000.1 | 603 |
| D17 | | | |
| Veillonella atypica ACS-134-V-Col7a | 303229466 | ZP_07316256.1 | 604 |
| Veillonella parvula ATCC 17745 | 282849530 | ZP_06258914.1 | 605 |
| Veillonella sp. 6_1_27 | 294792465 | ZP_06757612.1 | 606 |
| Veillonella sp. oral taxon 780 str. F0422 | 342213964 | ZP_08706676.1 | 607 |
| Verminephrobacter eiseniae EF01-2 | 500133006 | WP_011809011.1 | 608 |
| Weeksella virosa DSM 16922 | 503364269 | WP_013598930.1 | 609 |
| Wolinella succinogenes DSM 1740 | 499451967 | WP_011139431.1 | 610 |
| Wolinella succinogenes DSM 1740 | 499451825 | WP_011139289.1 | 611 |
| Zunongwangia profunda SM-A87 | 502838808 | WP_013073784.1 | 612 |

[0177] Provided herein are methods for treating a patient with Wiskott-Aldrich Syndrome (WAS). An aspect of such method is an ex vivo cell-based therapy. For example, a patient specific induced pluripotent stem cell (iPSC) can be created. Then, the chromosomal DNA of these iPS cells can be edited using the materials and methods described herein. Next, the genome-edited iPSCs can be differentiated into other cells. Finally, the differentiated cells are implanted into the patient.

[0178] Another aspect of such method is an ex vivo cell-based therapy. For example, a biopsy of the patient's liver is performed. Then, a liver specific progenitor cell or primary hepatocyte is isolated from the biopsied material. Next, the chromosomal DNA of these progenitor cells or primary hepatocytes is corrected using the materials and methods described herein. Finally, the progenitor cells or primary hepatocytes are implanted into the patient. Any source or type of cell may be used as the progenitor cell.

[0179] Yet another aspect of such method is an ex vivo cell-based therapy. For example, a mesenchymal stem cell can be isolated from the patient, which can be isolated from the patient's bone marrow or peripheral blood. Next, the chromosomal DNA of these mesenchymal stem cells can be edited using the materials and methods described herein. Next, the genome-edited mesenchymal stem cells can be differentiated into any type of cell, e.g., hepatocytes. Finally, the differentiated cells, e.g., hepatocytes are implanted into the patient.

[0180] Yet another aspect of such method is an ex vivo cell-based therapy. For example, a biological sample can be obtained from a subject (e.g., patient) having or suspected of having WAS and cells (e.g., CD34⁺ hematopoietic stem cell). Next, the chromosomal DNA of these hematopoietic stem cells can be edited using the materials and methods described herein. Next, the genome-edited hematopoietic stem cells can be differentiated into any type of cell. Finally, the differentiated cells are implanted into the patient. Alternatively, the genome-edited hematopoietic stem cells can be implanted into the patient, without a further differentiation process. In some embodiments, the genome-edited hematopoietic stem cells can be cultured to increase the cell number that is sufficient for the treatment.

[0181] One advantage of an ex vivo cell therapy approach is the ability to conduct a comprehensive analysis of the therapeutic prior to administration. Nuclease-based therapeutics can have some level of off-target effects. Performing gene correction ex vivo allows one to characterize the corrected cell population prior to implantation. The present disclosure includes sequencing the entire genome of the corrected cells to ensure that the off-target effects, if any, can be in genomic locations associated with minimal risk to the patient. Furthermore, populations of specific cells, including clonal populations, can be isolated prior to implantation.

[0182] Another advantage of ex vivo cell therapy relates to genetic correction in iPSCs compared to other primary cell sources. iPSCs are prolific, making it easy to obtain the large number of cells that will be required for a cell-based therapy. Furthermore, iPSCs are an ideal cell type for performing clonal isolations. This allows screening for the correct genomic correction, without risking a decrease in viability. In contrast, other primary cells, such as hepatocytes, are viable for only a few passages and difficult to clonally expand. Thus, manipulation of iPSCs for the treatment of Wiskott-Aldrich Syndrome (WAS) can be much easier, and can shorten the amount of time needed to make the desired genetic correction.

[0183] Methods can also include an in vivo based therapy. Chromosomal DNA of the cells in the patient is edited using the materials and methods described herein.

[0184] Although certain cells present an attractive target for ex vivo treatment and therapy, increased efficacy in delivery may permit direct in vivo delivery to such cells. Ideally the targeting and editing would be directed to the relevant cells. Cleavage in other cells can also be prevented by the use of promoters only active in certain cells and or developmental stages. Additional promoters are inducible, and therefore can be temporally controlled if the nuclease is delivered as a plasmid. The amount of time that delivered RNA and protein remain in the cell can also be adjusted using treatments or domains added to change the half-life. In vivo treatment would eliminate a number of treatment steps, but a lower rate of delivery can require higher rates of editing. In vivo treatment can eliminate problems and losses from ex vivo treatment and engraftment.

[0185] An advantage of in vivo gene therapy can be the ease of therapeutic production and administration. The same therapeutic approach and therapy will have the potential to be used to treat more than one patient, for example a number of patients who share the same or similar genotype or allele. In contrast, ex vivo cell therapy typically requires using a patient's own cells, which are isolated, manipulated and returned to the same patient.

[0186] Also provided herein is a cellular method for editing the WAS gene in a cell by genome editing. For example, a cell can be isolated from a patient or animal. Then, the chromosomal DNA of the cell can be edited using the materials and methods described herein.

[0187] The methods provided herein, regardless of whether a cellular or ex vivo or in vivo method, can involve one or a combination of the following: 1) correcting, by insertions or deletions that arise due to the imprecise NHEJ pathway, one or more mutations at, within, or near the WAS gene or other DNA sequences that encode regulatory elements of the WAS gene, 2) correcting, by HDR, one or more mutations at, within, or near the WAS gene or other DNA sequences that encode regulatory elements of the WAS gene, or 3) knocking-in WAS gene cDNA or a minigene (which may have one or more exons or introns or natural or synthetic introns) into the gene locus or at a heterologous location in the genome (such as a safe harbor site, such as AAVS1). In some embodiments, use of a safe harbor locus may include targeting an AAVS1 (PPP1R12C), an ALB gene, an Angpt13 gene, an ApoC3 gene, an ASGR2 gene, a CCR5 gene, a FIX (F9) gene, a G6PC gene, a Gys2 gene, an HGD gene, a Lp(a) gene, a Pcsk9 gene, a Serpinal gene, a TF gene, and a TTR gene). Assessment of efficiency of HDR mediated knock-in of cDNA into the first exon can utilize cDNA knock-in into “safe harbor” sites such as: single-stranded or double-stranded DNA having homologous arms to one of the following regions, for example: ApoC3 (chr11:116829908-116833071), Angpt13 (chr1:62,597,487-62,606,305), Serpinal (chr14:94376747-94390692), Lp(a) (chr6:160531483-160664259), Pcsk9 (chr1:55,039,475-55,064,852), FIX (chrX: 139,530,736-139,563,458), ALB (chr4:73,404,254-73,421,411), TTR (chr18:31,591,766-31,599,023), TF (chr3:133,661,997-133,779,005), G6PC (chr17:42,900,796-42,914,432), Gys2 (chr12:21,536,188-21,604,857), AAVS1(PPP1R12C) (chr19:55,090,912-55,117,599), HGD (chr3:120,628,167-120,682,570). CCR5 (chr3:46,370.854-46,376,206), ASGR2 (chr17:7,101,322-7,114,310). Both the HDR and knock-in strategies utilize a donor DNA template in Homology-Directed Repair (HDR). HDR in either strategy may be accomplished by making one or more single-stranded breaks (SSBs) or double-stranded breaks (DSBs) at specific sites in the genome by using one or more endonucleases.

[0188] For example, the NHEJ correction strategy can involve restoring the reading frame in the WAS gene by inducing one single stranded break or double stranded break in the gene of interest with one or more CRISPR endonucleases and a gRNA (e.g., crRNA+tracrRNA, or sgRNA), or two or more single stranded breaks or double stranded breaks in the gene of interest with two or more CRISPR endonucleases and two or more sgRNAs. This approach can require development and optimization of sgRNAs for the WAS gene.

[0189] For example, the HDR correction strategy can involve restoring the reading frame in the WAS gene by inducing one single stranded break or double stranded break in the gene of interest with one or more CRISPR endonucleases and a gRNA (e.g., crRNA+tracrRNA, or sgRNA), or two or more single stranded breaks or double stranded breaks in the gene of interest with one or more CRISPR endonucleases and two or more gRNAs, in the presence of a donor DNA template introduced exogenously to direct the cellular DSB response to Homology-Directed Repair (the donor DNA template can be a short single stranded oligonucleotide, a short double stranded oligonucleotide, a long single or double stranded DNA molecule). This approach can require development and optimization of gRNAs and donor DNA molecules for the WAS gene.

[0190] For example, the knock-in strategy involves knocking-in WAS gene cDNA or a minigene (which may have natural or synthetic enhancer and promoter, one or more exons, and natural or synthetic introns, and natural or synthetic 3′UTR and polyadenylation signal) into the locus of the gene using a gRNA (e.g., crRNA+tracrRNA, or sgRNA) or a pair of gRNAs targeting upstream of or in the first or other exon and/or intron of the WAS gene, or in a safe harbor site (such as AAVS1). The donor DNA can be single or double stranded DNA.

[0191] The advantages for the above strategies (correction and knock-in) are similar, including in principle both short and long term beneficial clinical and laboratory effects. The knock-in approach does provide one advantage over the correction approach—the ability to treat all patients versus only a subset of patients.

[0192] In addition to the above genome editing strategies, another strategy involves modulating expression, function, or activity of WAS gene by editing in the regulatory sequence.

[0193] In addition to the editing options listed above, Cas9 or similar proteins can be used to target effector domains to the same target sites that can be identified for editing, or additional target sites within range of the effector domain. A range of chromatin modifying enzymes, methylases or demethlyases can be used to alter expression of the target gene. One possibility is increasing the expression of the WAS protein if the mutation leads to lower activity. These types of epigenetic regulation have some advantages, particularly as they are limited in possible off-target effects.

[0194] A number of types of genomic target sites can be present in addition to mutations in the coding and splicing sequences.

[0195] The regulation of transcription and translation implicates a number of different classes of sites that interact with cellular proteins or nucleotides. Often the DNA binding sites of transcription factors or other proteins can be targeted for mutation or deletion to study the role of the site, though they can also be targeted to change gene expression. Sites can be added through non-homologous end joining NHEJ or direct genome editing by homology directed repair (HDR). Increased use of genome sequencing, RNA expression and genome-wide studies of transcription factor binding have increased our ability to identify how the sites lead to developmental or temporal gene regulation. These control systems can be direct or can involve extensive cooperative regulation that can require the integration of activities from multiple enhancers. Transcription factors typically bind 6-12 bp-long degenerate DNA sequences. The low level of specificity provided by individual sites suggests that complex interactions and rules are involved in binding and the functional outcome. Binding sites with less degeneracy can provide simpler means of regulation. Artificial transcription factors can be designed to specify longer sequences that have less similar sequences in the genome and have lower potential for off-target cleavage. Any of these types of binding sites can be mutated, deleted or even created to enable changes in gene regulation or expression (Canver, M. C, et al., Nature (2015)).

[0196] Another class of gene regulatory regions having these features is microRNA (miRNA) binding sites. miRNAs are non-coding RNAs that play key roles in post-transcriptional gene regulation. miRNA can regulate the expression of 30% of all mammalian protein-encoding genes. Specific and potent gene silencing by double stranded RNA (RNAi) was discovered, plus additional small noncoding RNA (Canver, M. C, et al., Nature (2015)). The largest class of noncoding RNAs important for gene silencing are miRNAs. In mammals, miRNAs are first transcribed as a long RNA transcript, which can be separate transcriptional units, part of protein introns, or other transcripts. The long transcripts are called primary miRNA (pri-miRNA) that include imperfectly base-paired hairpin structures. These pri-miRNA can be cleaved into one or more shorter precursor miRNAs (pre-miRNAs) by Microprocessor, a protein complex in the nucleus, involving Drosha.

[0197] Pre-miRNAs are short stem loops ˜70 nucleotides in length with a 2-nucleotide 3′-overhang that are exported, into the mature 19-25 nucleotide miRNA:miRNA* duplexes. The miRNA strand with lower base pairing stability (the guide strand) can be loaded onto the RNA-induced silencing complex (RISC). The passenger strand (marked with *), can be functional, but is usually degraded. The mature miRNA tethers RISC to partly complementary sequence motifs in target mRNAs predominantly found within the 3′ untranslated regions (UTRs) and induces posttranscriptional gene silencing (Bartel, D. P. Cell 136, 215-233 (2009); Saj, A. & Lai, E. C. Curr Opin Genet Dev 21, 504-510 (2011)).

[0198] miRNAs can be important in development, differentiation, cell cycle and growth control, and in virtually all biological pathways in mammals and other multicellular organisms. miRNAs can also be involved in cell cycle control, apoptosis and stem cell differentiation, hematopoiesis, hypoxia, muscle development, neurogenesis, insulin secretion, cholesterol metabolism, aging, viral replication and immune responses.

[0199] A single miRNA can target hundreds of different mRNA transcripts, while an individual transcript can be targeted by many different miRNAs. More than 28645 microRNAs have been annotated in the latest release of miRBase (v.21). Some miRNAs can be encoded by multiple loci, some of which can be expressed from tandemly co-transcribed clusters. The features allow for complex regulatory networks with multiple pathways and feedback controls. miRNAs can be integral parts of these feedback and regulatory circuits and can help regulate gene expression by keeping protein production within limits (Herranz, H. & Cohen, S. M. Genes Dev 24, 1339-1344 (2010); Posadas, D. M. & Carthew, R. W. Curr Opin Genet Dev 27, 1-6 (2014)).

[0200] miRNA can also be important in a large number of human diseases that are associated with abnormal miRNA expression. This association underscores the importance of the miRNA regulatory pathway. Recent miRNA deletion studies have linked miRNA with regulation of the immune responses (Stem-Ginossar. N, et al., Science 317, 376-381 (2007)).

[0201] miRNA also have a strong link to cancer and can play a role in different types of cancer. miRNAs have been found to be downregulated in a number of tumors. miRNA can be important in the regulation of key cancer-related pathways, such as cell cycle control and the DNA damage response, and can therefore be used in diagnosis and can be targeted clinically. MicroRNAs can delicately regulate the balance of angiogenesis, such that experiments depleting all microRNAs suppresses tumor angiogenesis (Chen, S, et al., Genes Dev 28, 1054-1067 (2014)).

[0202] As has been shown for protein coding genes, miRNA genes can also be subject to epigenetic changes occurring with cancer. Many miRNA loci can be associated with CpG islands increasing their opportunity for regulation by DNA methylation (Weber, B., Stresemann, C., Brueckner, B. & Lyko, F. Cell Cycle 6, 1001-1005 (2007)). The majority of studies have used treatment with chromatin remodeling drugs to reveal epigenetically silenced miRNAs.

[0203] In addition to their role in RNA silencing, miRNA can also activate translation (Posadas, D. M. & Carthew, R. W. Curr Opin Genet Dev 27, 1-6 (2014)). Knocking out these sites may lead to decreased expression of the targeted gene, while introducing these sites may increase expression.

[0204] Individual miRNA can be knocked out most effectively by mutating the seed sequence (bases 2-8 of the microRNA), which can be important for binding specificity. Cleavage in this region, followed by mis-repair by NHEJ can effectively abolish miRNA function by blocking binding to target sites. miRNA could also be inhibited by specific targeting of the special loop region adjacent to the palindromic sequence. Catalytically inactive Cas9 can also be used to inhibit shRNA expression (Zhao. Y, et al., Sci Rep 4, 3943 (2014)). In addition to targeting the miRNA, the binding sites can also be targeted and mutated to prevent the silencing by miRNA.

[0205] According to the present disclosure, any of the microRNA (miRNA) or their binding sites may be incorporated into the compositions of the disclosure.

[0206] The compositions may have a region such as, but not limited to, a region having the sequence of any of the microRNAs listed in Table 3 the reverse complement of the microRNAs listed in Table 3 or the microRNA anti-seed region of any of the microRNAs listed in Table 3.

[0207] The compositions of the disclosure may have one or more microRNA target sequences, microRNA sequences, or microRNA seeds. Such sequences may correspond to any known microRNA such as those taught in US Publication US2005/0261218 and US Publication US2005/0059005, the contents of which are incorporated herein by reference in their entirety. As a non-limiting embodiment, known microRNAs, their sequences and their binding site sequences in the human genome are listed below in Table 3.

[0208] A microRNA sequence has a “seed” region, i.e., a sequence in the region of positions 2-8 of the mature microRNA, which sequence has perfect Watson-Crick complementarity to the miRNA target sequence. A microRNA seed may have positions 2-8 or 2-7 of the mature microRNA. In some embodiments, a microRNA seed may have 7 nucleotides (e.g., nucleotides 2-8 of the mature microRNA), wherein the seed-complementary site in the corresponding miRNA target is flanked by an adenine (A) opposed to microRNA position 1. In some embodiments, a microRNA seed may have 6 nucleotides (e.g., nucleotides 2-7 of the mature microRNA), wherein the seed-complementary site in the corresponding miRNA target is flanked by an adenine (A) opposed to microRNA position 1. See for example, Grimson A, Farh K K. Johnston W K, Garrett-Engele P. Lim L P, Bartel D P; Mol Cell. 2007 Jul. 6; 27(1):91-105. The bases of the microRNA seed have complete complementarity with the target sequence.

[0209] Identification of microRNA, microRNA target regions, and their expression patterns and role in biology have been reported (Bonauer et al., Curr Drug Targets 2010 11:943-949; Anand and Cheresh Curr Opin Hematol 2011 18:171-176; Contreras and Rao Leukemia 2012 26:404-413 (2011 Dec. 20. doi: 10.1038/leu.2011.356); Bartel Cell 2009 136:215-233; Landgraf et al. Cell, 2007 129:1401-1414; Gentner and Naldini. Tissue Antigens. 2012 80:393-403 and all references therein; each of which is herein incorporated by reference in its entirety).

[0210] For example, if the composition is not intended to be delivered to the liver but ends up there, then miR-122, a microRNA abundant in liver, can inhibit the expression of the sequence delivered if one or multiple target sites of miR-122 are engineered into the polynucleotide encoding that target sequence. Introduction of one or multiple binding sites for different microRNA can be engineered to further decrease the longevity, stability, and protein translation hence providing an additional layer of tenability.

[0211] As used herein, the term “microRNA site” refers to a microRNA target site or a microRNA recognition site, or any nucleotide sequence to which a microRNA binds or associates. It should be understood that “binding” may follow traditional Watson-Crick hybridization rules or may reflect any stable association of the microRNA with the target sequence at or adjacent to the microRNA site.

[0212] Conversely, for the purposes of the compositions of the present disclosure, microRNA binding sites can be engineered out of (i.e. removed from) sequences in which they naturally occur in order to increase protein expression in specific tissues. For example, miR-122 binding sites may be removed to improve protein expression in the liver.

[0213] Specifically, microRNAs are known to be differentially expressed in immune cells (also called hematopoietic cells), such as antigen presenting cells (APCs) (e.g. dendritic cells and macrophages), macrophages, monocytes, B lymphocytes, T lymphocytes, granulocytes, natural killer cells, etc. Immune cell specific microRNAs are involved in immunogenicity, autoimmunity, the immune-response to infection, inflammation, as well as unwanted immune response after gene therapy and tissue/organ transplantation. Immune cells specific microRNAs also regulate many aspects of development, proliferation, differentiation and apoptosis of hematopoietic cells (immune cells). For example, miR-142 and miR-146 are exclusively expressed in the immune cells, particularly abundant in myeloid dendritic cells. Introducing the miR-142 binding site into the 3′-UTR of a polypeptide of the present disclosure can selectively suppress the gene expression in the antigen presenting cells through miR-142 mediated mRNA degradation, limiting antigen presentation in professional APCs (e.g. dendritic cells) and thereby preventing antigen-mediated immune response after gene delivery (see, Annoni A et al., blood, 2009, 114, 5152-5161, the content of which is herein incorporated by reference in its entirety.)

[0214] In one embodiment, microRNAs binding sites that are known to be expressed in immune cells, in particular, the antigen presenting cells, can be engineered into the polynucleotides to suppress the expression of the polynucleotide in APCs through microRNA mediated RNA degradation, subduing the antigen-mediated immune response, while the expression of the polynucleotide is maintained in non-immune cells where the immune cell specific microRNAs are not expressed.

[0215] Many microRNA expression studies have been conducted, and are described in the art, to profile the differential expression of microRNAs in various cancer cells/tissues and other diseases. Some microRNAs are abnormally over-expressed in certain cancer cells and others are under-expressed. For example, microRNAs are differentially expressed in cancer cells (WO2008/154098, US2013/0059015, US2013/0042333, WO2011/157294); cancer stem cells (US2012/0053224); pancreatic cancers and diseases (US2009/0131348, US2011/0171646, US2010/0286232, U.S. Pat. No. 8,389,210); asthma and inflammation (U.S. Pat. No. 8,415,096); prostate cancer (US2013/0053264); hepatocellular carcinoma (WO2012/151212, US2012/0329672, WO2008/054828, U.S. Pat. No. 8,252,538); lung cancer cells (WO2011/076143, WO2013/033640, WO2009/070653, US2010/0323357); cutaneous T cell lymphoma (WO2013/011378); colorectal cancer cells (WO2011/0281756, WO2011/076142); cancer positive lymph nodes (WO2009/100430, US2009/0263803); nasopharyngeal carcinoma (EP2112235); chronic obstructive pulmonary disease (US2012/0264626, US2013/0053263); thyroid cancer (WO2013/066678); ovarian cancer cells (US2012/0309645, WO2011/095623); breast cancer cells (WO2008/154098, WO2007/081740, US2012/0214699), leukemia and lymphoma (WO2008/073915, US2009/0092974, US2012/0316081, US2012/0283310, WO2010/018563, the content of each of which is incorporated herein by reference in their entirety).

[0216] Non-limiting examples of microRNA sequences and the targeted tissues and/or cells are described in Table 3.

TABLE 3
microRNA Sequences

| Types of Tissues and/or Cells | microRNA name | miR SEQ ID | miR BS SEQ ID |
|---|---|---|---|
| Abnormal skin (psoriasis) | hsa-miR-3934-3p | 613 | 614 |
| Abnormal skin (psoriasis) | hsa-miR-3934-5p | 615 | 616 |
| Abnormal skin (psoriasis) | hsa-miR-548ay-3p | 617 | 618 |
| Abnormal skin (psoriasis) | hsa-miR-548ay-5p | 619 | 620 |
| Abnormal skin (psoriasis) | hsa-miR-548az-3p | 621 | 622 |
| Abnormal skin (psoriasis) | hsa-miR-548az-5p | 623 | 624 |
| Abnormal skin (psoriasis) | hsa-miR-6499-3p | 625 | 626 |
| Abnormal skin (psoriasis) | hsa-miR-6499-5p | 627 | 628 |
| Abnormal skin (psoriasis) | hsa-miR-6500-3p | 629 | 630 |
| Abnormal skin (psoriasis) | hsa-miR-6500-5p | 631 | 632 |
| Abnormal skin (psoriasis) | hsa-miR-6501-3p | 633 | 634 |
| Abnormal skin (psoriasis) | hsa-miR-6501-5p | 635 | 636 |
| Abnormal skin (psoriasis) | hsa-miR-6502-3p | 637 | 638 |
| Abnormal skin (psoriasis) | hsa-miR-6502-5p | 639 | 640 |
| Abnormal skin (psoriasis) | hsa-miR-6503-3p | 641 | 642 |
| Abnormal skin (psoriasis) | hsa-miR-6503-5p | 643 | 644 |
| Abnormal skin (psoriasis) | hsa-miR-6504-3p | 645 | 646 |
| Abnormal skin (psoriasis) | hsa-miR-6504-5p | 647 | 648 |
| Abnormal skin (psoriasis) | hsa-miR-6505-3p | 649 | 650 |
| Abnormal skin (psoriasis) | hsa-miR-6505-5p | 651 | 652 |
| Abnormal skin (psoriasis) | hsa-miR-6506-3p | 653 | 654 |
| Abnormal skin (psoriasis) | hsa-miR-6506-5p | 655 | 656 |
| Abnormal skin (psoriasis) | hsa-miR-6507-3p | 657 | 658 |
| Abnormal skin (psoriasis) | hsa-miR-6507-5p | 659 | 660 |
| Abnormal skin (psoriasis) | hsa-miR-6508-3p | 661 | 662 |
| Abnormal skin (psoriasis) | hsa-miR-6508-5p | 663 | 664 |
| Abnormal skin (psoriasis) | hsa-miR-6509-3p | 665 | 666 |
| Abnormal skin (psoriasis) | hsa-miR-6509-5p | 667 | 668 |
| Abnormal skin (psoriasis) | hsa-miR-6510-3p | 669 | 670 |
| Abnormal skin (psoriasis) | hsa-miR-6510-5p | 671 | 672 |
| Abnormal skin (psoriasis) | hsa-miR-6512-3p | 673 | 674 |
| Abnormal skin (psoriasis) | hsa-miR-6512-5p | 675 | 676 |
| Abnormal skin (psoriasis) | hsa-miR-6513-3p | 677 | 678 |
| Abnormal skin (psoriasis) | hsa-miR-6513-5p | 679 | 680 |
| Abnormal skin (psoriasis) | hsa-miR-6514-3p | 681 | 682 |
| Abnormal skin (psoriasis) | hsa-miR-6514-5p | 683 | 684 |
| Abnormal skin (psoriasis) and epididymis | hsa-miR-6511a-3p | 685 | 686 |
| Abnormal skin (psoriasis) and epididymis | hsa-miR-6511a-5p | 687 | 688 |
| Abnormal skin (psoriasis) and epididymis | hsa-miR-6515-3p | 689 | 690 |
| Abnormal skin (psoriasis) and epididymis | hsa-miR-6515-5p | 691 | 692 |
| Acute Myeloid Leukemia | hsa-miR-3972 | 693 | 694 |
| Acute Myeloid Leukemia | hsa-miR-3973 | 695 | 696 |
| Acute Myeloid Leukemia | hsa-miR-3974 | 697 | 698 |
| Acute Myeloid Leukemia | hsa-miR-3975 | 699 | 700 |
| Acute Myeloid Leukemia | hsa-miR-3976 | 701 | 702 |
| Acute Myeloid Leukemia | hsa-miR-3977 | 703 | 704 |
| Acute Myeloid Leukemia | hsa-miR-3978 | 705 | 706 |
| Adipocyte | hsa-miR-642a-3p | 707 | 708 |
| Adipose, other tissues/cells, kidney | hsa-miR-204-5p | 709 | 710 |
| Adipose, other tissues/cells, kidney | hsa-miR-204-3p | 711 | 712 |
| Airway smooth muscle | hsa-miR-140-3p | 713 | 714 |
| B cells | hsa-miR-3135b | 715 | 716 |
| B cells | hsa-miR-3155b | 717 | 718 |
| B cells | hsa-miR-3689c | 719 | 720 |
| B cells | hsa-miR-3689d | 721 | 722 |
| B cells | hsa-miR-3689e | 723 | 724 |
| B cells | hsa-miR-3689f | 725 | 726 |
| B cells | hsa-miR-4417 | 727 | 728 |
| B cells | hsa-miR-4418 | 729 | 730 |
| B cells | hsa-miR-4419a | 731 | 732 |
| B cells | hsa-miR-4419b | 733 | 734 |
| B cells | hsa-miR-4420 | 735 | 736 |
| B cells | hsa-miR-4421 | 737 | 738 |
| B cells | hsa-miR-4424 | 739 | 740 |
| B cells | hsa-miR-4425 | 741 | 742 |
| B cells | hsa-miR-4426 | 743 | 744 |
| B cells | hsa-miR-4427 | 745 | 746 |
| B cells | hsa-miR-4428 | 747 | 748 |
| B cells | hsa-miR-4429 | 749 | 750 |
| B cells | hsa-miR-4430 | 751 | 752 |
| B cells | hsa-miR-4431 | 753 | 754 |
| B cells | hsa-miR-4432 | 755 | 756 |
| B cells | hsa-miR-4433-3p | 757 | 758 |
| B cells | hsa-miR-4433-5p | 759 | 760 |
| B cells | hsa-miR-4434 | 761 | 762 |
| B cells | hsa-miR-4435 | 763 | 764 |
| B cells | hsa-miR-4437 | 765 | 766 |
| B cells | hsa-miR-4438 | 767 | 768 |
| B cells | hsa-miR-4439 | 769 | 770 |
| B cells | hsa-miR-4440 | 771 | 772 |
| B cells | hsa-miR-4441 | 773 | 774 |
| B cells | hsa-miR-4442 | 775 | 776 |
| B cells | hsa-miR-4443 | 777 | 778 |
| B cells | hsa-miR-4444 | 779 | 780 |
| B cells | hsa-miR-4445-3p | 781 | 782 |
| B cells | hsa-miR-4445-5p | 783 | 784 |
| B cells | hsa-miR-4447 | 785 | 786 |
| B cells | hsa-miR-4448 | 787 | 788 |
| B cells | hsa-miR-4449 | 789 | 790 |
| B cells | hsa-miR-4450 | 791 | 792 |
| B cells | hsa-miR-4451 | 793 | 794 |
| B cells | hsa-miR-4452 | 795 | 796 |
| B cells | hsa-miR-4453 | 797 | 798 |
| B cells | hsa-miR-4454 | 799 | 800 |
| B cells | hsa-miR-4455 | 801 | 802 |
| B cells | hsa-miR-4456 | 803 | 804 |
| B cells | hsa-miR-4457 | 805 | 806 |
| B cells | hsa-miR-4458 | 807 | 808 |
| B cells | hsa-miR-4459 | 809 | 810 |
| B cells | hsa-miR-4460 | 811 | 812 |
| B cells | hsa-miR-4461 | 813 | 814 |
| B cells | hsa-miR-4462 | 815 | 816 |
| B cells | hsa-miR-4463 | 817 | 818 |
| B cells | hsa-miR-4464 | 819 | 820 |
| B cells | hsa-miR-4465 | 821 | 822 |
| B cells | hsa-miR-4466 | 823 | 824 |
| B cells | hsa-miR-4468 | 825 | 826 |
| B cells | hsa-miR-4470 | 827 | 828 |
| B cells | hsa-miR-4472 | 829 | 830 |
| B cells | hsa-miR-4473 | 831 | 832 |
| B cells | hsa-miR-4475 | 833 | 834 |
| B cells | hsa-miR-4476 | 835 | 836 |
| B cells | hsa-miR-4477a | 837 | 838 |
| B cells | hsa-miR-4477b | 839 | 840 |
| B cells | hsa-miR-4478 | 841 | 842 |
| B cells | hsa-miR-4479 | 843 | 844 |
| B cells | hsa-miR-4480 | 845 | 846 |
| B cells | hsa-miR-4481 | 847 | 848 |
| B cells | hsa-miR-4482-3p | 849 | 850 |
| B cells | hsa-miR-4482-5p | 851 | 852 |
| B cells | hsa-miR-4483 | 853 | 854 |
| B cells | hsa-miR-4484 | 855 | 856 |
| B cells | hsa-miR-4485 | 857 | 858 |
| B cells | hsa-miR-4486 | 859 | 860 |
| B cells | hsa-miR-4487 | 861 | 862 |
| B cells | hsa-miR-4488 | 863 | 864 |
| B cells | hsa-miR-4490 | 865 | 866 |
| B cells | hsa-miR-4491 | 867 | 868 |
| B cells | hsa-miR-4492 | 869 | 870 |
| B cells | hsa-miR-4493 | 871 | 872 |
| B cells | hsa-miR-4494 | 873 | 874 |
| B cells | hsa-miR-4495 | 875 | 876 |
| B cells | hsa-miR-4496 | 877 | 878 |
| B cells | hsa-miR-4497 | 879 | 880 |
| B cells | hsa-miR-4498 | 881 | 882 |
| B cells | hsa-miR-4499 | 883 | 884 |
| B cells | hsa-miR-4500 | 885 | 886 |
| B cells | hsa-miR-4501 | 887 | 888 |
| B cells | hsa-miR-4502 | 889 | 890 |
| B cells | hsa-miR-4503 | 891 | 892 |
| B cells | hsa-miR-4504 | 893 | 894 |
| B cells | hsa-miR-4505 | 895 | 896 |
| B cells | hsa-miR-4506 | 897 | 898 |
| B cells | hsa-miR-4507 | 899 | 900 |
| B cells | hsa-miR-4508 | 901 | 902 |
| B cells | hsa-miR-4509 | 903 | 904 |
| B cells | hsa-miR-4510 | 905 | 906 |
| B cells | hsa-miR-4511 | 907 | 908 |
| B cells | hsa-miR-4512 | 909 | 910 |
| B cells | hsa-miR-4513 | 911 | 912 |
| B cells | hsa-miR-4514 | 913 | 914 |
| B cells | hsa-miR-4515 | 915 | 916 |
| B cells | hsa-miR-4516 | 917 | 918 |
| B cells | hsa-miR-4517 | 919 | 920 |
| B cells | hsa-miR-4518 | 921 | 922 |
| B cells | hsa-miR-4519 | 923 | 924 |
| B cells | hsa-miR-4521 | 925 | 926 |
| B cells | hsa-miR-4522 | 927 | 928 |
| B cells | hsa-miR-4523 | 929 | 930 |
| B cells | hsa-miR-4525 | 931 | 932 |
| B cells | hsa-miR-4527 | 933 | 934 |
| B cells | hsa-miR-4528 | 935 | 936 |
| B cells | hsa-miR-4530 | 937 | 938 |
| B cells | hsa-miR-4531 | 939 | 940 |
| B cells | hsa-miR-4532 | 941 | 942 |
| B cells | hsa-miR-4533 | 943 | 944 |
| B cells | hsa-miR-4534 | 945 | 946 |
| B cells | hsa-miR-4535 | 947 | 948 |
| B cells | hsa-miR-4536-3p | 949 | 950 |
| B cells | hsa-miR-4536-5p | 951 | 952 |
| B cells | hsa-miR-4537 | 953 | 954 |
| B cells | hsa-miR-4538 | 955 | 956 |
| B cells | hsa-miR-4539 | 957 | 958 |
| B cells | hsa-miR-4540 | 959 | 960 |
| B-cells | hsa-miR-1587 | 961 | 962 |
| B-cells | hsa-miR-2392 | 963 | 964 |
| B-cells | hsa-miR-548ab | 965 | 966 |
| B-cells | hsa-miR-548ac | 967 | 968 |
| B-cells | hsa-miR-548ad | 969 | 970 |
| B-cells | hsa-miR-548ae | 971 | 972 |
| B-cells | hsa-miR-548ag | 973 | 974 |
| B-cells | hsa-miR-548ah-3p | 975 | 976 |
| B-cells | hsa-miR-548ah-5p | 977 | 978 |
| B-cells | hsa-miR-548ai | 979 | 980 |
| B-cells | hsa-miR-548aj-3p | 981 | 982 |
| B-cells | hsa-miR-548aj-5p | 983 | 984 |
| B-cells | hsa-miR-548ak | 985 | 986 |
| B-cells | hsa-miR-548al | 987 | 988 |
| B-cells | hsa-miR-548am-3p | 989 | 990 |
| B-cells | hsa-miR-548am-5p | 991 | 992 |
| B-cells | hsa-miR-548an | 993 | 994 |
| Blood | hsa-miR-1538 | 995 | 996 |
| Blood | hsa-miR-202-3p | 997 | 998 |
| Blood | hsa-miR-202-5p | 999 | 1000 |
| Blood | hsa-miR-376b-3p | 1001 | 1002 |
| Blood | hsa-miR-376b-5p | 1003 | 1004 |
| Blood | hsa-miR-496 | 1005 | 1006 |
| Blood | hsa-miR-718 | 1007 | 1008 |
| Blood (myeloid cells), liver, endothelial | hsa-miR-21-5p | 1009 | 1010 |
| cells | | | |
| Blood (immune cells) | hsa-miR-28-3p | 1011 | 1012 |
| Blood (immune cells) | hsa-miR-28-5p | 1013 | 1014 |
| Blood (lymphocytes) | hsa-miR-598 | 1015 | 1016 |
| Blood (myeloid cells) | hsa-miR-574-3p | 1017 | 1018 |
| Blood (myeloid cells), glioblast, liver, | hsa-miR-21-3p | 1019 | 1020 |
| vascular endothelial cells | | | |
| Blood (myeloid cells), other tissues/cells | hsa-miR-197-3p | 1021 | 1022 |
| Blood (myeloid cells), other tissues/cells | hsa-miR-197-5p | 1023 | 1024 |
| Blood (plasma) | hsa-miR-500b | 1025 | 1026 |
| Blood and glia | hsa-miR-32-3p | 1027 | 1028 |
| Blood and glia | hsa-miR-32-5p | 1029 | 1030 |
| Blood and other tissues | hsa-miR-26a-2-3p | 1031 | 1032 |
| Blood and other tissues | hsa-miR-26a-5p | 1033 | 1034 |
| Blood mononuclear cells | hsa-miR-935 | 1035 | 1036 |
| Blood (plasma) | hsa-miR-205-3p | 1037 | 1038 |
| Blood (plasma) | hsa-miR-205-5p | 1039 | 1040 |
| Blood (plasma), ovary | hsa-miR-224-3p | 1041 | 1042 |
| Blood (plasma), ovary | hsa-miR-224-5p | 1043 | 1044 |
| Blood, embryonic stem cells, | hsa-miR-16-1-3p | 1045 | 1046 |
| hematopoietic tissues (spleen) | | | |
| Blood, endothelial cells | hsa-miR-361-3p | 1047 | 1048 |
| Blood, heart (myocardial) | hsa-miR-320a | 1049 | 1050 |
| Blood, tongue, pancreas (islet) | hsa-miR-184 | 1051 | 1052 |
| Bone marrow | hsa-miR-654-5p | 1053 | 1054 |
| Brain | hsa-miR-1271-3p | 1055 | 1056 |
| Brain | hsa-miR-1271-5p | 1057 | 1058 |
| Brain | hsa-miR-137 | 1059 | 1060 |
| Brain | hsa-miR-153 | 1061 | 1062 |
| Brain | hsa-miR-183-3p | 1063 | 1064 |
| Brain | hsa-miR-183-5p | 1065 | 1066 |
| Brain | hsa-miR-190a | 1067 | 1068 |
| Brain | hsa-miR-190b | 1069 | 1070 |
| Brain | hsa-miR-3665 | 1071 | 1072 |
| Brain | hsa-miR-3666 | 1073 | 1074 |
| Brain | hsa-miR-380-3p | 1075 | 1076 |
| Brain | hsa-miR-410 | 1077 | 1078 |
| Brain | hsa-miR-425-3p | 1079 | 1080 |
| Brain | hsa-miR-425-5p | 1081 | 1082 |
| Brain | hsa-miR-510 | 1083 | 1084 |
| Brain | hsa-miR-7-5p | 1085 | 1086 |
| Brain | hsa-miR-9-3p | 1087 | 1088 |
| Brain | hsa-miR-9-5p | 1089 | 1090 |
| Brain and hematopoietic cells | hsa-miR-125a-3p | 1091 | 1092 |
| Brain and hematopoietic cells | hsa-miR-125a-5p | 1093 | 1094 |
| Brain and pancreas | hsa-miR-7-2-3p | 1095 | 1096 |
| Brain and plasma (circulating) | hsa-miR-124-5p | 1097 | 1098 |
| Brain, and plasma (exosomal) | hsa-miR-124-3p | 1099 | 1100 |
| Brain and platelet | hsa-miR-329 | 1101 | 1102 |
| Brain (neuron), immune cells | hsa-miR-132-3p | 1103 | 1104 |
| Brain (neuron), immune cells | hsa-miR-132-5p | 1105 | 1106 |
| Brain (neuron), spleen | hsa-miR-212-3p | 1107 | 1108 |
| Brain (neuron), spleen | hsa-miR-212-5p | 1109 | 1110 |
| Brain, circulating plasma | hsa-miR-342-3p | 1111 | 1112 |
| Brain, embryonic stem cells | hsa-miR-380-5p | 1113 | 1114 |
| Brain, epithelial cells, hepatocytes | hsa-miR-802 | 1115 | 1116 |
| Brain, oligodendrocytes | hsa-miR-219-1-3p | 1117 | 1118 |
| Brain, oligodendrocytes | hsa-miR-219-2-3p | 1119 | 1120 |
| Brain, oligodendrocytes | hsa-miR-219-5p | 1121 | 1122 |
| Brain, other tissues | hsa-miR-135a-3p | 1123 | 1124 |
| Brain, other tissues | hsa-miR-135a-5p | 1125 | 1126 |
| Brain, placenta, other tissues | hsa-miR-135b-3p | 1127 | 1128 |
| Brain, placenta, other tissues | hsa-miR-135b-5p | 1129 | 1130 |
| Brain, stem cells/progenitor | hsa-miR-181c-3p | 1131 | 1132 |
| Brain, stem cells/progenitor | hsa-miR-181c-5p | 1133 | 1134 |
| Breast tumor | hsa-miR-3180-5p | 1135 | 1136 |
| Breast tumor | hsa-miR-3529-3p | 1137 | 1138 |
| Breast tumor | hsa-miR-3529-5p | 1139 | 1140 |
| Breast tumor | hsa-miR-3591-3p | 1141 | 1142 |
| Breast tumor | hsa-miR-3591-5p | 1143 | 1144 |
| Breast tumor | hsa-miR-3688-3p | 1145 | 1146 |
| Breast tumor | hsa-miR-3688-5p | 1147 | 1148 |
| Breast tumor | hsa-miR-3940-3p | 1149 | 1150 |
| Breast tumor | hsa-miR-3940-5p | 1151 | 1152 |
| Breast tumor | hsa-miR-3944-3p | 1153 | 1154 |
| Breast tumor | hsa-miR-3944-5p | 1155 | 1156 |
| Breast tumor | hsa-miR-4436b-3p | 1157 | 1158 |
| Breast tumor | hsa-miR-4436b-5p | 1159 | 1160 |
| Breast tumor | hsa-miR-4520b-3p | 1161 | 1162 |
| Breast tumor | hsa-miR-4520b-5p | 1163 | 1164 |
| Breast tumor | hsa-miR-4632-3p | 1165 | 1166 |
| Breast tumor | hsa-miR-4632-5p | 1167 | 1168 |
| Breast tumor | hsa-miR-4633-3p | 1169 | 1170 |
| Breast tumor | hsa-miR-4633-5p | 1171 | 1172 |
| Breast tumor | hsa-miR-4634 | 1173 | 1174 |
| Breast tumor | hsa-miR-4635 | 1175 | 1176 |
| Breast tumor | hsa-miR-4636 | 1177 | 1178 |
| Breast tumor | hsa-miR-4638-3p | 1179 | 1180 |
| Breast tumor | hsa-miR-4638-5p | 1181 | 1182 |
| Breast tumor | hsa-miR-4639-3p | 1183 | 1184 |
| Breast tumor | hsa-miR-4639-5p | 1185 | 1186 |
| Breast tumor | hsa-miR-4640-3p | 1187 | 1188 |
| Breast tumor | hsa-miR-4640-5p | 1189 | 1190 |
| Breast tumor | hsa-miR-4641 | 1191 | 1192 |
| Breast tumor | hsa-miR-4642 | 1193 | 1194 |
| Breast tumor | hsa-miR-4643 | 1195 | 1196 |
| Breast tumor | hsa-miR-4644 | 1197 | 1198 |
| Breast tumor | hsa-miR-4645-3p | 1199 | 1200 |
| Breast tumor | hsa-miR-4645-5p | 1201 | 1202 |
| Breast tumor | hsa-miR-4646-3p | 1203 | 1204 |
| Breast tumor | hsa-miR-4646-5p | 1205 | 1206 |
| Breast tumor | hsa-miR-4647 | 1207 | 1208 |
| Breast tumor | hsa-miR-4648 | 1209 | 1210 |
| Breast tumor | hsa-miR-4649-3p | 1211 | 1212 |
| Breast tumor | hsa-miR-4649-5p | 1213 | 1214 |
| Breast tumor | hsa-miR-4650-3p | 1215 | 1216 |
| Breast tumor | hsa-miR-4650-5p | 1217 | 1218 |
| Breast tumor | hsa-miR-4651 | 1219 | 1220 |
| Breast tumor | hsa-miR-4652-3p | 1221 | 1222 |
| Breast tumor | hsa-miR-4652-5p | 1223 | 1224 |
| Breast tumor | hsa-miR-4653-3p | 1225 | 1226 |
| Breast tumor | hsa-miR-4653-5p | 1227 | 1228 |
| Breast tumor | hsa-miR-4654 | 1229 | 1230 |
| Breast tumor | hsa-miR-4655-3p | 1231 | 1232 |
| Breast tumor | hsa-miR-4655-5p | 1233 | 1234 |
| Breast tumor | hsa-miR-4656 | 1235 | 1236 |
| Breast tumor | hsa-miR-4657 | 1237 | 1238 |
| Breast tumor | hsa-miR-4658 | 1239 | 1240 |
| Breast tumor | hsa-miR-4659a-3p | 1241 | 1242 |
| Breast tumor | hsa-miR-4659a-5p | 1243 | 1244 |
| Breast tumor | hsa-miR-4659b-3p | 1245 | 1246 |
| Breast tumor | hsa-miR-4659b-5p | 1247 | 1248 |
| Breast tumor | hsa-miR-4660 | 1249 | 1250 |
| Breast tumor | hsa-miR-4661-3p | 1251 | 1252 |
| Breast tumor | hsa-miR-4661-5p | 1253 | 1254 |
| Breast tumor | hsa-miR-4662b | 1255 | 1256 |
| Breast tumor | hsa-miR-4663 | 1257 | 1258 |
| Breast tumor | hsa-miR-4664-3p | 1259 | 1260 |
| Breast tumor | hsa-miR-4664-5p | 1261 | 1262 |
| Breast tumor | hsa-miR-4665-3p | 1263 | 1264 |
| Breast tumor | hsa-miR-4665-5p | 1265 | 1266 |
| Breast tumor | hsa-miR-4666a-3p | 1267 | 1268 |
| Breast tumor | hsa-miR-4666a-5p | 1269 | 1270 |
| Breast tumor | hsa-miR-4667-3p | 1271 | 1272 |
| Breast tumor | hsa-miR-4667-5p | 1273 | 1274 |
| Breast tumor | hsa-miR-4668-3p | 1275 | 1276 |
| Breast tumor | hsa-miR-4668-5p | 1277 | 1278 |
| Breast tumor | hsa-miR-4669 | 1279 | 1280 |
| Breast tumor | hsa-miR-4670-3p | 1281 | 1282 |
| Breast tumor | hsa-miR-4670-5p | 1283 | 1284 |
| Breast tumor | hsa-miR-4671-3p | 1285 | 1286 |
| Breast tumor | hsa-miR-4671-5p | 1287 | 1288 |
| Breast tumor | hsa-miR-4672 | 1289 | 1290 |
| Breast tumor | hsa-miR-4673 | 1291 | 1292 |
| Breast tumor | hsa-miR-4674 | 1293 | 1294 |
| Breast tumor | hsa-miR-4675 | 1295 | 1296 |
| Breast tumor | hsa-miR-4676-3p | 1297 | 1298 |
| Breast tumor | hsa-miR-4676-5p | 1299 | 1300 |
| Breast tumor | hsa-miR-4678 | 1301 | 1302 |
| Breast tumor | hsa-miR-4679 | 1303 | 1304 |
| Breast tumor | hsa-miR-4680-3p | 1305 | 1306 |
| Breast tumor | hsa-miR-4680-5p | 1307 | 1308 |
| Breast tumor | hsa-miR-4681 | 1309 | 1310 |
| Breast tumor | hsa-miR-4682 | 1311 | 1312 |
| Breast tumor | hsa-miR-4683 | 1313 | 1314 |
| Breast tumor | hsa-miR-4684-3p | 1315 | 1316 |
| Breast tumor | hsa-miR-4684-5p | 1317 | 1318 |
| Breast tumor | hsa-miR-4685-3p | 1319 | 1320 |
| Breast tumor | hsa-miR-4685-5p | 1321 | 1322 |
| Breast tumor | hsa-miR-4686 | 1323 | 1324 |
| Breast tumor | hsa-miR-4687-3p | 1325 | 1326 |
| Breast tumor | hsa-miR-4687-5p | 1327 | 1328 |
| Breast tumor | hsa-miR-4688 | 1329 | 1330 |
| Breast tumor | hsa-miR-4689 | 1331 | 1332 |
| Breast tumor | hsa-miR-4690-3p | 1333 | 1334 |
| Breast tumor | hsa-miR-4690-5p | 1335 | 1336 |
| Breast tumor | hsa-miR-4691-3p | 1337 | 1338 |
| Breast tumor | hsa-miR-4691-5p | 1339 | 1340 |
| Breast tumor | hsa-miR-4692 | 1341 | 1342 |
| Breast tumor | hsa-miR-4693-3p | 1343 | 1344 |
| Breast tumor | hsa-miR-4693-5p | 1345 | 1346 |
| Breast tumor | hsa-miR-4694-3p | 1347 | 1348 |
| Breast tumor | hsa-miR-4694-5p | 1349 | 1350 |
| Breast tumor | hsa-miR-4695-3p | 1351 | 1352 |
| Breast tumor | hsa-miR-4695-5p | 1353 | 1354 |
| Breast tumor | hsa-miR-4696 | 1355 | 1356 |
| Breast tumor | hsa-miR-4697-3p | 1357 | 1358 |
| Breast tumor | hsa-miR-4697-5p | 1359 | 1360 |
| Breast tumor | hsa-miR-4698 | 1361 | 1362 |
| Breast tumor | hsa-miR-4699-3p | 1363 | 1364 |
| Breast tumor | hsa-miR-4699-5p | 1365 | 1366 |
| Breast tumor | hsa-miR-4700-3p | 1367 | 1368 |
| Breast tumor | hsa-miR-4700-5p | 1369 | 1370 |
| Breast tumor | hsa-miR-4701-3p | 1371 | 1372 |
| Breast tumor | hsa-miR-4701-5p | 1373 | 1374 |
| Breast tumor | hsa-miR-4703-3p | 1375 | 1376 |
| Breast tumor | hsa-miR-4703-5p | 1377 | 1378 |
| Breast tumor | hsa-miR-4704-3p | 1379 | 1380 |
| Breast tumor | hsa-miR-4704-5p | 1381 | 1382 |
| Breast tumor | hsa-miR-4705 | 1383 | 1384 |
| Breast tumor | hsa-miR-4706 | 1385 | 1386 |
| Breast tumor | hsa-miR-4707-3p | 1387 | 1388 |
| Breast tumor | hsa-miR-4707-5p | 1389 | 1390 |
| Breast tumor | hsa-miR-4708-3p | 1391 | 1392 |
| Breast tumor | hsa-miR-4708-5p | 1393 | 1394 |
| Breast tumor | hsa-miR-4709-3p | 1395 | 1396 |
| Breast tumor | hsa-miR-4709-5p | 1397 | 1398 |
| Breast tumor | hsa-miR-4710 | 1399 | 1400 |
| Breast tumor | hsa-miR-4711-3p | 1401 | 1402 |
| Breast tumor | hsa-miR-4711-5p | 1403 | 1404 |
| Breast tumor | hsa-miR-4712-3p | 1405 | 1406 |
| Breast tumor | hsa-miR-4712-5p | 1407 | 1408 |
| Breast tumor | hsa-miR-4713-3p | 1409 | 1410 |
| Breast tumor | hsa-miR-4713-5p | 1411 | 1412 |
| Breast tumor | hsa-miR-4714-3p | 1413 | 1414 |
| Breast tumor | hsa-miR-4714-5p | 1415 | 1416 |
| Breast tumor | hsa-miR-4715-3p | 1417 | 1418 |
| Breast tumor | hsa-miR-4715-5p | 1419 | 1420 |
| Breast tumor | hsa-miR-4716-3p | 1421 | 1422 |
| Breast tumor | hsa-miR-4716-5p | 1423 | 1424 |
| Breast tumor | hsa-miR-4717-3p | 1425 | 1426 |
| Breast tumor | hsa-miR-4717-5p | 1427 | 1428 |
| Breast tumor | hsa-miR-4718 | 1429 | 1430 |
| Breast tumor | hsa-miR-4719 | 1431 | 1432 |
| Breast tumor | hsa-miR-4720-3p | 1433 | 1434 |
| Breast tumor | hsa-miR-4720-5p | 1435 | 1436 |
| Breast tumor | hsa-miR-4721 | 1437 | 1438 |
| Breast tumor | hsa-miR-4722-3p | 1439 | 1440 |
| Breast tumor | hsa-miR-4722-5p | 1441 | 1442 |
| Breast tumor | hsa-miR-4723-3p | 1443 | 1444 |
| Breast tumor | hsa-miR-4723-5p | 1445 | 1446 |
| Breast tumor | hsa-miR-4724-3p | 1447 | 1448 |
| Breast tumor | hsa-miR-4724-5p | 1449 | 1450 |
| Breast tumor | hsa-miR-4725-3p | 1451 | 1452 |
| Breast tumor | hsa-miR-4725-5p | 1453 | 1454 |
| Breast tumor | hsa-miR-4726-3p | 1455 | 1456 |
| Breast tumor | hsa-miR-4726-5p | 1457 | 1458 |
| Breast tumor | hsa-miR-4727-3p | 1459 | 1460 |
| Breast tumor | hsa-miR-4727-5p | 1461 | 1462 |
| Breast tumor | hsa-miR-4728-3p | 1463 | 1464 |
| Breast tumor | hsa-miR-4728-5p | 1465 | 1466 |
| Breast tumor | hsa-miR-4729 | 1467 | 1468 |
| Breast tumor | hsa-miR-4730 | 1469 | 1470 |
| Breast tumor | hsa-miR-4731-3p | 1471 | 1472 |
| Breast tumor | hsa-miR-4731-5p | 1473 | 1474 |
| Breast tumor | hsa-miR-4732-3p | 1475 | 1476 |
| Breast tumor | hsa-miR-4732-5p | 1477 | 1478 |
| Breast tumor | hsa-miR-4733-3p | 1479 | 1480 |
| Breast tumor | hsa-miR-4733-5p | 1481 | 1482 |
| Breast tumor | hsa-miR-4734 | 1483 | 1484 |
| Breast tumor | hsa-miR-4735-3p | 1485 | 1486 |
| Breast tumor | hsa-miR-4735-5p | 1487 | 1488 |
| Breast tumor | hsa-miR-4736 | 1489 | 1490 |
| Breast tumor | hsa-miR-4737 | 1491 | 1492 |
| Breast tumor | hsa-miR-4738-3p | 1493 | 1494 |
| Breast tumor | hsa-miR-4738-5p | 1495 | 1496 |
| Breast tumor | hsa-miR-4739 | 1497 | 1498 |
| Breast tumor | hsa-miR-4740-3p | 1499 | 1500 |
| Breast tumor | hsa-miR-4740-5p | 1501 | 1502 |
| Breast tumor | hsa-miR-4742-5p | 1503 | 1504 |
| Breast tumor | hsa-miR-4743-3p | 1505 | 1506 |
| Breast tumor | hsa-miR-4743-5p | 1507 | 1508 |
| Breast tumor | hsa-miR-4744 | 1509 | 1510 |
| Breast tumor | hsa-miR-4745-3p | 1511 | 1512 |
| Breast tumor | hsa-miR-4745-5p | 1513 | 1514 |
| Breast tumor | hsa-miR-4746-3p | 1515 | 1516 |
| Breast tumor | hsa-miR-4746-5p | 1517 | 1518 |
| Breast tumor | hsa-miR-4747-3p | 1519 | 1520 |
| Breast tumor | hsa-miR-4747-5p | 1521 | 1522 |
| Breast tumor | hsa-miR-4748 | 1523 | 1524 |
| Breast tumor | hsa-miR-4749-3p | 1525 | 1526 |
| Breast tumor | hsa-miR-4749-5p | 1527 | 1528 |
| Breast tumor | hsa-miR-4750-3p | 1529 | 1530 |
| Breast tumor | hsa-miR-4750-5p | 1531 | 1532 |
| Breast tumor | hsa-miR-4751 | 1533 | 1534 |
| Breast tumor | hsa-miR-4752 | 1535 | 1536 |
| Breast tumor | hsa-miR-4753-3p | 1537 | 1538 |
| Breast tumor | hsa-miR-4753-5p | 1539 | 1540 |
| Breast tumor | hsa-miR-4754 | 1541 | 1542 |
| Breast tumor | hsa-miR-4755-3p | 1543 | 1544 |
| Breast tumor | hsa-miR-4755-5p | 1545 | 1546 |
| Breast tumor | hsa-miR-4756-3p | 1547 | 1548 |
| Breast tumor | hsa-miR-4756-5p | 1549 | 1550 |
| Breast tumor | hsa-miR-4757-3p | 1551 | 1552 |
| Breast tumor | hsa-miR-4757-5p | 1553 | 1554 |
| Breast tumor | hsa-miR-4758-3p | 1555 | 1556 |
| Breast tumor | hsa-miR-4758-5p | 1557 | 1558 |
| Breast tumor | hsa-miR-4759 | 1559 | 1560 |
| Breast tumor | hsa-miR-4760-3p | 1561 | 1562 |
| Breast tumor | hsa-miR-4760-5p | 1563 | 1564 |
| Breast tumor | hsa-miR-4761-3p | 1565 | 1566 |
| Breast tumor | hsa-miR-4761-5p | 1567 | 1568 |
| Breast tumor | hsa-miR-4762-3p | 1569 | 1570 |
| Breast tumor | hsa-miR-4762-5p | 1571 | 1572 |
| Breast tumor | hsa-miR-4763-3p | 1573 | 1574 |
| Breast tumor | hsa-miR-4763-5p | 1575 | 1576 |
| Breast tumor | hsa-miR-4764-3p | 1577 | 1578 |
| Breast tumor | hsa-miR-4764-5p | 1579 | 1580 |
| Breast tumor | hsa-miR-4765 | 1581 | 1582 |
| Breast tumor | hsa-miR-4766-3p | 1583 | 1584 |
| Breast tumor | hsa-miR-4766-5p | 1585 | 1586 |
| Breast tumor | hsa-miR-4767 | 1587 | 1588 |
| Breast tumor | hsa-miR-4768-3p | 1589 | 1590 |
| Breast tumor | hsa-miR-4768-5p | 1591 | 1592 |
| Breast tumor | hsa-miR-4769-3p | 1593 | 1594 |
| Breast tumor | hsa-miR-4769-5p | 1595 | 1596 |
| Breast tumor | hsa-miR-4770 | 1597 | 1598 |
| Breast tumor | hsa-miR-4771 | 1599 | 1600 |
| Breast tumor | hsa-miR-4773 | 1601 | 1602 |
| Breast tumor | hsa-miR-4775 | 1603 | 1604 |
| Breast tumor | hsa-miR-4776-3p | 1605 | 1606 |
| Breast tumor | hsa-miR-4776-5p | 1607 | 1608 |
| Breast tumor | hsa-miR-4777-3p | 1609 | 1610 |
| Breast tumor | hsa-miR-4777-5p | 1611 | 1612 |
| Breast tumor | hsa-miR-4778-3p | 1613 | 1614 |
| Breast tumor | hsa-miR-4778-5p | 1615 | 1616 |
| Breast tumor | hsa-miR-4779 | 1617 | 1618 |
| Breast tumor | hsa-miR-4780 | 1619 | 1620 |
| Breast tumor | hsa-miR-4781-3p | 1621 | 1622 |
| Breast tumor | hsa-miR-4781-5p | 1623 | 1624 |
| Breast tumor | hsa-miR-4782-3p | 1625 | 1626 |
| Breast tumor | hsa-miR-4782-5p | 1627 | 1628 |
| Breast tumor | hsa-miR-4783-3p | 1629 | 1630 |
| Breast tumor | hsa-miR-4783-5p | 1631 | 1632 |
| Breast tumor | hsa-miR-4784 | 1633 | 1634 |
| Breast tumor | hsa-miR-4785 | 1635 | 1636 |
| Breast tumor | hsa-miR-4786-3p | 1637 | 1638 |
| Breast tumor | hsa-miR-4786-5p | 1639 | 1640 |
| Breast tumor | hsa-miR-4787-3p | 1641 | 1642 |
| Breast tumor | hsa-miR-4787-5p | 1643 | 1644 |
| Breast tumor | hsa-miR-4788 | 1645 | 1646 |
| Breast tumor | hsa-miR-4789-3p | 1647 | 1648 |
| Breast tumor | hsa-miR-4789-5p | 1649 | 1650 |
| Breast tumor | hsa-miR-4790-3p | 1651 | 1652 |
| Breast tumor | hsa-miR-4790-5p | 1653 | 1654 |
| Breast tumor | hsa-miR-4791 | 1655 | 1656 |
| Breast tumor | hsa-miR-4792 | 1657 | 1658 |
| Breast tumor | hsa-miR-4793-3p | 1659 | 1660 |
| Breast tumor | hsa-miR-4793-5p | 1661 | 1662 |
| Breast tumor | hsa-miR-4794 | 1663 | 1664 |
| Breast tumor | hsa-miR-4795-3p | 1665 | 1666 |
| Breast tumor | hsa-miR-4795-5p | 1667 | 1668 |
| Breast tumor | hsa-miR-4796-3p | 1669 | 1670 |
| Breast tumor | hsa-miR-4796-5p | 1671 | 1672 |
| Breast tumor | hsa-miR-4797-3p | 1673 | 1674 |
| Breast tumor | hsa-miR-4797-5p | 1675 | 1676 |
| Breast tumor | hsa-miR-4798-3p | 1677 | 1678 |
| Breast tumor | hsa-miR-4798-5p | 1679 | 1680 |
| Breast tumor | hsa-miR-4799-3p | 1681 | 1682 |
| Breast tumor | hsa-miR-4799-5p | 1683 | 1684 |
| Breast tumor | hsa-miR-4800-3p | 1685 | 1686 |
| Breast tumor | hsa-miR-4800-5p | 1687 | 1688 |
| Breast tumor | hsa-miR-4801 | 1689 | 1690 |
| Breast tumor | hsa-miR-4803 | 1691 | 1692 |
| Breast tumor | hsa-miR-4804-3p | 1693 | 1694 |
| Breast tumor | hsa-miR-4804-5p | 1695 | 1696 |
| Breast tumor and B cells | hsa-miR-4422 | 1697 | 1698 |
| Breast tumor and B cells | hsa-miR-4436a | 1699 | 1700 |
| Breast tumor and B cells | hsa-miR-4446-3p | 1701 | 1702 |
| Breast tumor and B cells | hsa-miR-4446-5p | 1703 | 1704 |
| Breast tumor and B cells | hsa-miR-4467 | 1705 | 1706 |
| Breast tumor and B cells | hsa-miR-4469 | 1707 | 1708 |
| Breast tumor and B cells | hsa-miR-4471 | 1709 | 1710 |
| Breast tumor and B cells | hsa-miR-4489 | 1711 | 1712 |
| Breast tumor and B cells | hsa-miR-4526 | 1713 | 1714 |
| Breast tumor and B cells | hsa-miR-4529-3p | 1715 | 1716 |
| Breast tumor and B cells | hsa-miR-4529-5p | 1717 | 1718 |
| Breast tumor and B cells, skin (psoriasis) | hsa-miR-4520a-3p | 1719 | 1720 |
| Breast tumor and B cells, skin (psoriasis) | hsa-miR-4520a-5p | 1721 | 1722 |
| Breast tumor and B cells, skin (psoriasis) | hsa-miR-4524a-3p | 1723 | 1724 |
| Breast tumor and B cells, skin (psoriasis) | hsa-miR-4524a-5p | 1725 | 1726 |
| Breast tumor and B cells, skin (psoriasis) | hsa-miR-4524b-3p | 1727 | 1728 |
| Breast tumor and B cells, skin (psoriasis) | hsa-miR-4524b-5p | 1729 | 1730 |
| Breast tumor and female reproductive | hsa-miR-3911 | 1731 | 1732 |
| tract | | | |
| Breast tumor and female reproductive | hsa-miR-3913-3p | 1733 | 1734 |
| tract | | | |
| Breast tumor and female reproductive | hsa-miR-3913-5p | 1735 | 1736 |
| tract | | | |
| Breast tumor and female reproductive | hsa-miR-3914 | 1737 | 1738 |
| tract | | | |
| Breast tumor and female reproductive | hsa-miR-3922-3p | 1739 | 1740 |
| tract | | | |
| Breast tumor and female reproductive | hsa-miR-3922-5p | 1741 | 1742 |
| tract | | | |
| Breast tumor and female reproductive | hsa-miR-3925-3p | 1743 | 1744 |
| tract | | | |
| Breast tumor and female reproductive | hsa-miR-3925-5p | 1745 | 1746 |
| tract | | | |
| Breast tumor and lymphoblastic leukemia | hsa-miR-3936 | 1747 | 1748 |
| Breast tumor and lymphoblastic leukemia | hsa-miR-3942-3p | 1749 | 1750 |
| Breast tumor and lymphoblastic leukemia | hsa-miR-3942-5p | 1751 | 1752 |
| Breast tumor and lymphoblastic leukemia | hsa-miR-4637 | 1753 | 1754 |
| Breast tumor and lymphoblastic leukemia | hsa-miR-4774-3p | 1755 | 1756 |
| Breast tumor and lymphoblastic leukemia | hsa-miR-4774-5p | 1757 | 1758 |
| Breast tumor, B cells and skin (psoriasis) | hsa-miR-4423-5p | 1759 | 1760 |
| Breast tumor, B cells and skin (psoriasis) | hsa-miR-4423-3p | 1761 | 1762 |
| Breast tumor, blood mononuclear cells | hsa-miR-4772-3p | 1763 | 1764 |
| Breast tumor, blood mononuclear cells | hsa-miR-4772-5p | 1765 | 1766 |
| Breast tumor, lymphoblastic leukemia and | hsa-miR-4474-3p | 1767 | 1768 |
| B cells | | | |
| Breast tumor, lymphoblastic leukemia and | hsa-miR-4474-5p | 1769 | 1770 |
| B cells | | | |
| Breast tumor, psoriasis | hsa-miR-4662a-3p | 1771 | 1772 |
| Breast tumor, psoriasis | hsa-miR-4662a-5p | 1773 | 1774 |
| Breast tumor, psoriasis | hsa-miR-4677-3p | 1775 | 1776 |
| Breast tumor, psoriasis | hsa-miR-4677-5p | 1777 | 1778 |
| Breast tumor, psoriasis | hsa-miR-4741 | 1779 | 1780 |
| Breast tumor, psoriasis | hsa-miR-4742-3p | 1781 | 1782 |
| Breast tumor, psoriasis | hsa-miR-4802-3p | 1783 | 1784 |
| Breast tumor, psoriasis | hsa-miR-4802-5p | 1785 | 1786 |
| Breast tumor | hsa-miR-3619-3p | 1787 | 1788 |
| Breast tumor | hsa-miR-3619-5p | 1789 | 1790 |
| Breast tumor | hsa-miR-3622a-3p | 1791 | 1792 |
| Breast tumor | hsa-miR-3622a-5p | 1793 | 1794 |
| Breast tumor | hsa-miR-3659 | 1795 | 1796 |
| Breast tumor | hsa-miR-3660 | 1797 | 1798 |
| Breast tumor | hsa-miR-3661 | 1799 | 1800 |
| Breast tumor | hsa-miR-3664-3p | 1801 | 1802 |
| Breast tumor | hsa-miR-3664-5p | 1803 | 1804 |
| Breast tumor | hsa-miR-3180-3p | 1805 | 1806 |
| Breast, myeloid cells, ciliated epithelial | hsa-miR-34a-3p | 1807 | 1808 |
| cells | | | |
| Breast, myeloid cells, ciliated epithelial | hsa-miR-34a-5p | 1809 | 1810 |
| cells | | | |
| Breast, pancreas (islet) | hsa-miR-195-3p | 1811 | 1812 |
| Breast, pancreas (islet) | hsa-miR-195-5p | 1813 | 1814 |
| Cardiomyocytes | hsa-miR-590-3p | 1815 | 1816 |
| Cardiomyocytes | hsa-miR-590-5p | 1817 | 1818 |
| Cartilage (chondrocyte), fetal brain | hsa-miR-483-5p | 1819 | 1820 |
| Cartilage (chondrocytes) | hsa-miR-140-5p | 1821 | 1822 |
| Cartilage (chondrocytes) | hsa-miR-576-5p | 1823 | 1824 |
| Cartilage (chondrocytes) | hsa-miR-634 | 1825 | 1826 |
| Cartilage (chondrocytes) | hsa-miR-641 | 1827 | 1828 |
| Cartilage (chondrocytes) | hsa-miR-582-3p | 1829 | 1830 |
| Cartilage (chondrocytes) | hsa-miR-1227-3p | 1831 | 1832 |
| Cartilage (chondrocytes) | hsa-miR-1227-5p | 1833 | 1834 |
| Central nervous system (CNS) | hsa-miR-320b | 1835 | 1836 |
| Central nervous system (CNS) | hsa-miR-198 | 1837 | 1838 |
| Cervical and breast tumors | hsa-miR-3614-3p | 1839 | 1840 |
| Cervical and breast tumors | hsa-miR-3614-5p | 1841 | 1842 |
| Cervical cancer | hsa-miR-933 | 1843 | 1844 |
| Cervical cancer | hsa-miR-934 | 1845 | 1846 |
| Cervical cancer | hsa-miR-940 | 1847 | 1848 |
| Cervical cancer | hsa-miR-943 | 1849 | 1850 |
| Cervical tumor | hsa-miR-548aa | 1851 | 1852 |
| Cervical tumor | hsa-miR-548z | 1853 | 1854 |
| Cervical tumor | hsa-miR-550b-2-5p | 1855 | 1856 |
| Cervical tumor | hsa-miR-550b-3p | 1857 | 1858 |
| Cervical tumor | hsa-miR-642b-3p | 1859 | 1860 |
| Cervical tumor | hsa-miR-642b-5p | 1861 | 1862 |
| Cervical tumor | hsa-miR-3606-3p | 1863 | 1864 |
| Cervical tumor | hsa-miR-3606-5p | 1865 | 1866 |
| Cervical tumor | hsa-miR-3607-3p | 1867 | 1868 |
| Cervical tumor | hsa-miR-3607-5p | 1869 | 1870 |
| Cervical tumor | hsa-miR-3609 | 1871 | 1872 |
| Cervical tumor | hsa-miR-3610 | 1873 | 1874 |
| Cervical tumor | hsa-miR-3611 | 1875 | 1876 |
| Cervical tumor | hsa-miR-3612 | 1877 | 1878 |
| Cervical tumor | hsa-miR-3613-3p | 1879 | 1880 |
| Cervical tumor | hsa-miR-3613-5p | 1881 | 1882 |
| Cervical tumor | hsa-miR-3615 | 1883 | 1884 |
| Cervical tumor | hsa-miR-3616-3p | 1885 | 1886 |
| Cervical tumor | hsa-miR-3616-5p | 1887 | 1888 |
| Cervical tumor | hsa-miR-3618 | 1889 | 1890 |
| Cervical tumor | hsa-miR-3620-3p | 1891 | 1892 |
| Cervical tumor | hsa-miR-3620-5p | 1893 | 1894 |
| Cervical tumor | hsa-miR-3621 | 1895 | 1896 |
| Cervical tumor | hsa-miR-3622b-3p | 1897 | 1898 |
| Cervical tumor | hsa-miR-3622b-5p | 1899 | 1900 |
| Cervical tumor and psoriasis | hsa-miR-3617-3p | 1901 | 1902 |
| Cervical tumor and psoriasis | hsa-miR-3617-5p | 1903 | 1904 |
| Cholesterol regulation and brain | hsa-miR-758-3p | 1905 | 1906 |
| Cholesterol regulation and brain | hsa-miR-758-5p | 1907 | 1908 |
| Chondrocyte | hsa-miR-320c | 1909 | 1910 |
| Chondrocyte | hsa-miR-624-3p | 1911 | 1912 |
| Chondrocyte | hsa-miR-624-5p | 1913 | 1914 |
| Chondrocyte | hsa-miR-630 | 1915 | 1916 |
| Chondrocyte, ciliated epithelial cells | hsa-miR-449a | 1917 | 1918 |
| Chondrogenesis, lung, brain | hsa-miR-381-3p | 1919 | 1920 |
| Chondrogenesis, lung, brain | hsa-miR-381-5p | 1921 | 1922 |
| Ciliated epithelial cells | hsa-miR-34b-3p | 1923 | 1924 |
| Ciliated epithelial cells | hsa-miR-34b-5p | 1925 | 1926 |
| Ciliated epithelial cells, other tissues | hsa-miR-449b-3p | 1927 | 1928 |
| Ciliated epithelial cells, other tissues | hsa-miR-449b-5p | 1929 | 1930 |
| Ciliated epithelial cells, placenta | hsa-miR-34c-3p | 1931 | 1932 |
| Ciliated epithelial cells, placenta | hsa-miR-34c-5p | 1933 | 1934 |
| Circulating micrornas (in Plasma) | hsa-miR-572 | 1935 | 1936 |
| Circulating micrornas (in Plasma) | hsa-miR-614 | 1937 | 1938 |
| Circulating micrornas (in Plasma) | hsa-miR-648 | 1939 | 1940 |
| Circulating micrornas (in Plasma) | hsa-miR-342-5p | 1941 | 1942 |
| CNS (prefrontal cortex) | hsa-miR-30d-3p | 1943 | 1944 |
| CNS (prefrontal cortex), embryoid body | hsa-miR-30d-5p | 1945 | 1946 |
| cells | | | |
| CNS (prefrontal cortex), other tissues | hsa-miR-30a-5p | 1947 | 1948 |
| Colorectal micrornaome | hsa-miR-548a | 1949 | 1950 |
| Colorectal micrornaome | hsa-miR-548a-3p | 1951 | 1952 |
| Colorectal micrornaome | hsa-miR-548a-5p | 1953 | 1954 |
| Colorectal micrornaome | hsa-miR-548b-3p | 1955 | 1956 |
| Colorectal micrornaome | hsa-miR-548c-3p | 1957 | 1958 |
| Colorectal micrornaome | hsa-miR-548d-3p | 1959 | 1960 |
| Colorectal micrornaome | hsa-miR-548d-5p | 1961 | 1962 |
| Colorectal micrornaome | hsa-miR-549a | 1963 | 1964 |
| Colorectal micrornaome | hsa-miR-552 | 1965 | 1966 |
| Colorectal micrornaome | hsa-miR-553 | 1967 | 1968 |
| Colorectal micrornaome | hsa-miR-554 | 1969 | 1970 |
| Colorectal micrornaome | hsa-miR-555 | 1971 | 1972 |
| Colorectal micrornaome | hsa-miR-556-3p | 1973 | 1974 |
| Colorectal micrornaome | hsa-miR-556-5p | 1975 | 1976 |
| Colorectal micrornaome | hsa-miR-563 | 1977 | 1978 |
| Colorectal micrornaome | hsa-miR-568 | 1979 | 1980 |
| Colorectal micrornaome | hsa-miR-573 | 1981 | 1982 |
| Colorectal micrornaome | hsa-miR-576-3p | 1983 | 1984 |
| Colorectal micrornaome | hsa-miR-577 | 1985 | 1986 |
| Colorectal micrornaome | hsa-miR-578 | 1987 | 1988 |
| Colorectal micrornaome | hsa-miR-586 | 1989 | 1990 |
| Colorectal micrornaome | hsa-miR-587 | 1991 | 1992 |
| Colorectal micrornaome | hsa-miR-588 | 1993 | 1994 |
| Colorectal micrornaome | hsa-miR-597 | 1995 | 1996 |
| Colorectal micrornaome | hsa-miR-600 | 1997 | 1998 |
| Colorectal micrornaome | hsa-miR-604 | 1999 | 2000 |
| Colorectal micrornaome | hsa-miR-605 | 2001 | 2002 |
| Colorectal micrornaome | hsa-miR-606 | 2003 | 2004 |
| Colorectal micrornaome | hsa-miR-607 | 2005 | 2006 |
| Colorectal micrornaome | hsa-miR-6070 | 2007 | 2008 |
| Colorectal micrornaome | hsa-miR-609 | 2009 | 2010 |
| Colorectal micrornaome | hsa-miR-619 | 2011 | 2012 |
| Colorectal micrornaome | hsa-miR-620 | 2013 | 2014 |
| Colorectal micrornaome | hsa-miR-626 | 2015 | 2016 |
| Colorectal micrornaome | hsa-miR-631 | 2017 | 2018 |
| Colorectal micrornaome | hsa-miR-635 | 2019 | 2020 |
| Colorectal micrornaome | hsa-miR-637 | 2021 | 2022 |
| Colorectal micrornaome | hsa-miR-639 | 2023 | 2024 |
| Colorectal micrornaome | hsa-miR-642a-5p | 2025 | 2026 |
| Colorectal micrornaome | hsa-miR-643 | 2027 | 2028 |
| Colorectal micrornaome | hsa-miR-651 | 2029 | 2030 |
| Colorectal micrornaome | hsa-miR-653 | 2031 | 2032 |
| Colorectal micrornaome | hsa-miR-654-3p | 2033 | 2034 |
| Corneal epithelial cells | hsa-miR-762 | 2035 | 2036 |
| Dendritic cells | hsa-let-7c | 2037 | 2038 |
| Dendritic cells and macrophages | hsa-miR-511 | 2039 | 2040 |
| Embryoid body cells | hsa-miR-1247-3p | 2041 | 2042 |
| Embryoid body cells | hsa-miR-1247-5p | 2043 | 2044 |
| Embryoid body cells | hsa-miR-1262 | 2045 | 2046 |
| Embryoid body cells | hsa-miR-1269a | 2047 | 2048 |
| Embryoid body cells | hsa-miR-1269b | 2049 | 2050 |
| Embryoid body cells | hsa-miR-1277-3p | 2051 | 2052 |
| Embryoid body cells | hsa-miR-1277-5p | 2053 | 2054 |
| Embryoid body cells | hsa-miR-1287 | 2055 | 2056 |
| Embryoid body cells | hsa-miR-1290 | 2057 | 2058 |
| Embryoid body cells | hsa-miR-340-5p | 2059 | 2060 |
| Embryoid body cells, central nervous | hsa-miR-454-3p | 2061 | 2062 |
| system, monocytes | | | |
| Embryoid body cells, central nervous | hsa-miR-454-5p | 2063 | 2064 |
| system, monocytes | | | |
| Embryoid body cells | hsa-miR-302e | 2065 | 2066 |
| Embryonic stem cells | hsa-miR-1234-3p | 2067 | 2068 |
| Embryonic stem cells | hsa-miR-1234-5p | 2069 | 2070 |
| Embryonic stem cells | hsa-let-7d-3p | 2071 | 2072 |
| Embryonic stem cells | hsa-let-7d-5p | 2073 | 2074 |
| Embryonic stem cells | hsa-miR-106b-3p | 2075 | 2076 |
| Embryonic stem cells | hsa-miR-106b-5p | 2077 | 2078 |
| Embryonic stem cells | hsa-miR-1243 | 2079 | 2080 |
| Embryonic stem cells | hsa-miR-1244 | 2081 | 2082 |
| Embryonic stem cells | hsa-miR-1245a | 2083 | 2084 |
| Embryonic stem cells | hsa-miR-1245b-3p | 2085 | 2086 |
| Embryonic stem cells | hsa-miR-1245b-5p | 2087 | 2088 |
| Embryonic stem cells | hsa-miR-1251 | 2089 | 2090 |
| Embryonic stem cells | hsa-miR-1252 | 2091 | 2092 |
| Embryonic stem cells | hsa-miR-1253 | 2093 | 2094 |
| Embryonic stem cells | hsa-miR-1254 | 2095 | 2096 |
| Embryonic stem cells | hsa-miR-1255a | 2097 | 2098 |
| Embryonic stem cells | hsa-miR-1255b-2-3p | 2099 | 2100 |
| Embryonic stem cells | hsa-miR-1255b-5p | 2101 | 2102 |
| Embryonic stem cells | hsa-miR-1256 | 2103 | 2104 |
| Embryonic stem cells | hsa-miR-1257 | 2105 | 2106 |
| Embryonic stem cells | hsa-miR-1258 | 2107 | 2108 |
| Embryonic stem cells | hsa-miR-1261 | 2109 | 2110 |
| Embryonic stem cells | hsa-miR-1263 | 2111 | 2112 |
| Embryonic stem cells | hsa-miR-1264 | 2113 | 2114 |
| Embryonic stem cells | hsa-miR-1265 | 2115 | 2116 |
| Embryonic stem cells | hsa-miR-1266 | 2117 | 2118 |
| Embryonic stem cells | hsa-miR-1267 | 2119 | 2120 |
| Embryonic stem cells | hsa-miR-1268a | 2121 | 2122 |
| Embryonic stem cells | hsa-miR-1268b | 2123 | 2124 |
| Embryonic stem cells | hsa-miR-1270 | 2125 | 2126 |
| Embryonic stem cells | hsa-miR-1272 | 2127 | 2128 |
| Embryonic stem cells | hsa-miR-1273a | 2129 | 2130 |
| Embryonic stem cells | hsa-miR-1273d | 2131 | 2132 |
| Embryonic stem cells | hsa-miR-1275 | 2133 | 2134 |
| Embryonic stem cells | hsa-miR-1276 | 2135 | 2136 |
| Embryonic stem cells | hsa-miR-1278 | 2137 | 2138 |
| Embryonic stem cells | hsa-miR-1282 | 2139 | 2140 |
| Embryonic stem cells | hsa-miR-1288 | 2141 | 2142 |
| Embryonic stem cells | hsa-miR-1293 | 2143 | 2144 |
| Embryonic stem cells | hsa-miR-1294 | 2145 | 2146 |
| Embryonic stem cells | hsa-miR-1297 | 2147 | 2148 |
| Embryonic stem cells | hsa-miR-1299 | 2149 | 2150 |
| Embryonic stem cells | hsa-miR-1305 | 2151 | 2152 |
| Embryonic stem cells | hsa-miR-1306-3p | 2153 | 2154 |
| Embryonic stem cells | hsa-miR-1306-5p | 2155 | 2156 |
| Embryonic stem cells | hsa-miR-1307-3p | 2157 | 2158 |
| Embryonic stem cells | hsa-miR-1307-5p | 2159 | 2160 |
| Embryonic stem cells | hsa-miR-146b-5p | 2161 | 2162 |
| Embryonic stem cells | hsa-miR-154-3p | 2163 | 2164 |
| Embryonic stem cells | hsa-miR-154-5p | 2165 | 2166 |
| Embryonic stem cells | hsa-miR-1910 | 2167 | 2168 |
| Embryonic stem cells | hsa-miR-1913 | 2169 | 2170 |
| Embryonic stem cells | hsa-miR-1914-3p | 2171 | 2172 |
| Embryonic stem cells | hsa-miR-1914-5p | 2173 | 2174 |
| Embryonic stem cells | hsa-miR-1915-3p | 2175 | 2176 |
| Embryonic stem cells | hsa-miR-1915-5p | 2177 | 2178 |
| Embryonic stem cells | hsa-miR-2113 | 2179 | 2180 |
| Embryonic stem cells | hsa-miR-2355-3p | 2181 | 2182 |
| Embryonic stem cells | hsa-miR-2355-5p | 2183 | 2184 |
| Embryonic stem cells | hsa-miR-301a-3p | 2185 | 2186 |
| Embryonic stem cells | hsa-miR-301a-5p | 2187 | 2188 |
| Embryonic stem cells | hsa-miR-302b-3p | 2189 | 2190 |
| Embryonic stem cells | hsa-miR-302b-5p | 2191 | 2192 |
| Embryonic stem cells | hsa-miR-302c-3p | 2193 | 2194 |
| Embryonic stem cells | hsa-miR-302c-5p | 2195 | 2196 |
| Embryonic stem cells | hsa-miR-302d-3p | 2197 | 2198 |
| Embryonic stem cells | hsa-miR-302d-5p | 2199 | 2200 |
| Embryonic stem cells | hsa-miR-367-3p | 2201 | 2202 |
| Embryonic stem cells | hsa-miR-367-5p | 2203 | 2204 |
| Embryonic stem cells | hsa-miR-423-3p | 2205 | 2206 |
| Embryonic stem cells | hsa-miR-548e | 2207 | 2208 |
| Embryonic stem cells | hsa-miR-548f | 2209 | 2210 |
| Embryonic stem cells | hsa-miR-548g-3p | 2211 | 2212 |
| Embryonic stem cells | hsa-miR-548g-5p | 2213 | 2214 |
| Embryonic stem cells | hsa-miR-548h-3p | 2215 | 2216 |
| Embryonic stem cells | hsa-miR-548h-5p | 2217 | 2218 |
| Embryonic stem cells | hsa-miR-548k | 2219 | 2220 |
| Embryonic stem cells | hsa-miR-548l | 2221 | 2222 |
| Embryonic stem cells | hsa-miR-548m | 2223 | 2224 |
| Embryonic stem cells | hsa-miR-548o-3p | 2225 | 2226 |
| Embryonic stem cells | hsa-miR-548o-5p | 2227 | 2228 |
| Embryonic stem cells | hsa-miR-548p | 2229 | 2230 |
| Embryonic stem cells | hsa-miR-6086 | 2231 | 2232 |
| Embryonic stem cells | hsa-miR-6087 | 2233 | 2234 |
| Embryonic stem cells | hsa-miR-6088 | 2235 | 2236 |
| Embryonic stem cells | hsa-miR-6089 | 2237 | 2238 |
| Embryonic stem cells | hsa-miR-6090 | 2239 | 2240 |
| Embryonic stem cells | hsa-miR-664a-3p | 2241 | 2242 |
| Embryonic stem cells | hsa-miR-664a-5p | 2243 | 2244 |
| Embryonic stem cells | hsa-miR-664b-3p | 2245 | 2246 |
| Embryonic stem cells | hsa-miR-664b-5p | 2247 | 2248 |
| Embryonic stem cells | hsa-miR-766-3p | 2249 | 2250 |
| Embryonic stem cells | hsa-miR-766-5p | 2251 | 2252 |
| Embryonic stem cells | hsa-miR-885-3p | 2253 | 2254 |
| Embryonic stem cells | hsa-miR-885-5p | 2255 | 2256 |
| Embryonic stem cells | hsa-miR-93-3p | 2257 | 2258 |
| Embryonic stem cells | hsa-miR-93-5p | 2259 | 2260 |
| Embryonic stem cells | hsa-miR-941 | 2261 | 2262 |
| Embryonic stem cells and a variety of | hsa-miR-103a-2-5p | 2263 | 2264 |
| cells and tissues | | | |
| Embryonic stem cells and a variety of | hsa-miR-103a-3p | 2265 | 2266 |
| cells and tissues | | | |
| Embryonic stem cells and neural | hsa-miR-4251 | 2267 | 2268 |
| precursors | | | |
| Embryonic stem cells and neural | hsa-miR-4252 | 2269 | 2270 |
| precursors | | | |
| Embryonic stem cells and neural | hsa-miR-4253 | 2271 | 2272 |
| precursors | | | |
| Embryonic stem cells and neural | hsa-miR-4254 | 2273 | 2274 |
| precursors | | | |
| Embryonic stem cells and neural | hsa-miR-4255 | 2275 | 2276 |
| precursors | | | |
| Embryonic stem cells and neural | hsa-miR-4256 | 2277 | 2278 |
| precursors | | | |
| Embryonic stem cells and neural | hsa-miR-4257 | 2279 | 2280 |
| precursors | | | |
| Embryonic stem cells and neural | hsa-miR-4258 | 2281 | 2282 |
| precursors | | | |
| Embryonic stem cells and neural | hsa-miR-4259 | 2283 | 2284 |
| precursors | | | |
| Embryonic stem cells and neural | hsa-miR-4260 | 2285 | 2286 |
| precursors | | | |
| Embryonic stem cells and neural | hsa-miR-4261 | 2287 | 2288 |
| precursors | | | |
| Embryonic stem cells and neural | hsa-miR-4262 | 2289 | 2290 |
| precursors | | | |
| Embryonic stem cells and neural | hsa-miR-4263 | 2291 | 2292 |
| precursors | | | |
| Embryonic stem cells and neural | hsa-miR-4264 | 2293 | 2294 |
| precursors | | | |
| Embryonic stem cells and neural | hsa-miR-4265 | 2295 | 2296 |
| precursors | | | |
| Embryonic stem cells and neural | hsa-miR-4266 | 2297 | 2298 |
| precursors | | | |
| Embryonic stem cells and neural | hsa-miR-4267 | 2299 | 2300 |
| precursors | | | |
| Embryonic stem cells and neural | hsa-miR-4268 | 2301 | 2302 |
| precursors | | | |
| Embryonic stem cells and neural | hsa-miR-4269 | 2303 | 2304 |
| precursors | | | |
| Embryonic stem cells and neural | hsa-miR-4270 | 2305 | 2306 |
| precursors | | | |
| Embryonic stem cells and neural | hsa-miR-4271 | 2307 | 2308 |
| precursors | | | |
| Embryonic stem cells and neural | hsa-miR-4272 | 2309 | 2310 |
| precursors | | | |
| Embryonic stem cells and neural | hsa-miR-4274 | 2311 | 2312 |
| precursors | | | |
| Embryonic stem cells and neural | hsa-miR-4275 | 2313 | 2314 |
| precursors | | | |
| Embryonic stem cells and neural | hsa-miR-4276 | 2315 | 2316 |
| precursors | | | |
| Embryonic stem cells and neural | hsa-miR-4277 | 2317 | 2318 |
| precursors | | | |
| Embryonic stem cells and neural | hsa-miR-4278 | 2319 | 2320 |
| precursors | | | |
| Embryonic stem cells and neural | hsa-miR-4279 | 2321 | 2322 |
| precursors | | | |
| Embryonic stem cells and neural | hsa-miR-4280 | 2323 | 2324 |
| precursors | | | |
| Embryonic stem cells and neural | hsa-miR-4281 | 2325 | 2326 |
| precursors | | | |
| Embryonic stem cells and neural | hsa-miR-4282 | 2327 | 2328 |
| precursors | | | |
| Embryonic stem cells and neural | hsa-miR-4283 | 2329 | 2330 |
| precursors | | | |
| Embryonic stem cells and neural | hsa-miR-4284 | 2331 | 2332 |
| precursors | | | |
| Embryonic stem cells and neural | hsa-miR-4285 | 2333 | 2334 |
| precursors | | | |
| Embryonic stem cells and neural | hsa-miR-4286 | 2335 | 2336 |
| precursors | | | |
| Embryonic stem cells and neural | hsa-miR-4287 | 2337 | 2338 |
| precursors | | | |
| Embryonic stem cells and neural | hsa-miR-4288 | 2339 | 2340 |
| precursors | | | |
| Embryonic stem cells and neural | hsa-miR-4289 | 2341 | 2342 |
| precursors | | | |
| Embryonic stem cells and neural | hsa-miR-4290 | 2343 | 2344 |
| precursors | | | |
| Embryonic stem cells and neural | hsa-miR-4291 | 2345 | 2346 |
| precursors | | | |
| Embryonic stem cells and neural | hsa-miR-4292 | 2347 | 2348 |
| precursors | | | |
| Embryonic stem cells and neural | hsa-miR-4293 | 2349 | 2350 |
| precursors | | | |
| Embryonic stem cells and neural | hsa-miR-4294 | 2351 | 2352 |
| precursors | | | |
| Embryonic stem cells and neural | hsa-miR-4295 | 2353 | 2354 |
| precursors | | | |
| Embryonic stem cells and neural | hsa-miR-4296 | 2355 | 2356 |
| precursors | | | |
| Embryonic stem cells and neural | hsa-miR-4297 | 2357 | 2358 |
| precursors | | | |
| Embryonic stem cells and neural | hsa-miR-4298 | 2359 | 2360 |
| precursors | | | |
| Embryonic stem cells and neural | hsa-miR-4299 | 2361 | 2362 |
| precursors | | | |
| Embryonic stem cells and neural | hsa-miR-4300 | 2363 | 2364 |
| precursors | | | |
| Embryonic stem cells and neural | hsa-miR-4301 | 2365 | 2366 |
| precursors | | | |
| Embryonic stem cells and neural | hsa-miR-4302 | 2367 | 2368 |
| precursors | | | |
| Embryonic stem cells and neural | hsa-miR-4303 | 2369 | 2370 |
| precursors | | | |
| Embryonic stem cells and neural | hsa-miR-4304 | 2371 | 2372 |
| precursors | | | |
| Embryonic stem cells and neural | hsa-miR-4305 | 2373 | 2374 |
| precursors | | | |
| Embryonic stem cells and neural | hsa-miR-4306 | 2375 | 2376 |
| precursors | | | |
| Embryonic stem cells and neural | hsa-miR-4307 | 2377 | 2378 |
| precursors | | | |
| Embryonic stem cells and neural | hsa-miR-4308 | 2379 | 2380 |
| precursors | | | |
| Embryonic stem cells and neural | hsa-miR-4309 | 2381 | 2382 |
| precursors | | | |
| Embryonic stem cells and neural | hsa-miR-4310 | 2383 | 2384 |
| precursors | | | |
| Embryonic stem cells and neural | hsa-miR-4311 | 2385 | 2386 |
| precursors | | | |
| Embryonic stem cells and neural | hsa-miR-4312 | 2387 | 2388 |
| precursors | | | |
| Embryonic stem cells and neural | hsa-miR-4313 | 2389 | 2390 |
| precursors | | | |
| Embryonic stem cells and neural | hsa-miR-4314 | 2391 | 2392 |
| precursors | | | |
| Embryonic stem cells and neural | hsa-miR-4315 | 2393 | 2394 |
| precursors | | | |
| Embryonic stem cells and neural | hsa-miR-4316 | 2395 | 2396 |
| precursors | | | |
| Embryonic stem cells and neural | hsa-miR-4317 | 2397 | 2398 |
| precursors | | | |
| Embryonic stem cells and neural | hsa-miR-4318 | 2399 | 2400 |
| precursors | | | |
| Embryonic stem cells and neural | hsa-miR-4319 | 2401 | 2402 |
| precursors | | | |
| Embryonic stem cells and neural | hsa-miR-4320 | 2403 | 2404 |
| precursors | | | |
| Embryonic stem cells and neural | hsa-miR-4321 | 2405 | 2406 |
| precursors | | | |
| Embryonic stem cells and neural | hsa-miR-4322 | 2407 | 2408 |
| precursors | | | |
| Embryonic stem cells and neural | hsa-miR-4323 | 2409 | 2410 |
| precursors | | | |
| Embryonic stem cells and neural | hsa-miR-4324 | 2411 | 2412 |
| precursors | | | |
| Embryonic stem cells and neural | hsa-miR-4325 | 2413 | 2414 |
| precursors | | | |
| Embryonic stem cells and neural | hsa-miR-4326 | 2415 | 2416 |
| precursors | | | |
| Embryonic stem cells and neural | hsa-miR-4327 | 2417 | 2418 |
| precursors | | | |
| Embryonic stem cells and neural | hsa-miR-4328 | 2419 | 2420 |
| precursors | | | |
| Embryonic stem cells and neural | hsa-miR-4329 | 2421 | 2422 |
| precursors | | | |
| Embryonic stem cells and neural | hsa-miR-4330 | 2423 | 2424 |
| precursors | | | |
| Embryonic stem cells, airway smooth | hsa-miR-25-3p | 2425 | 2426 |
| muscle | | | |
| Embryonic stem cells, airway smooth | hsa-miR-25-5p | 2427 | 2428 |
| muscle | | | |
| Embryonic stem cells, Blood and other | hsa-miR-26a-1-3p | 2429 | 2430 |
| tissues | | | |
| Embryonic stem cells, epithelial cells | hsa-miR-1246 | 2431 | 2432 |
| Embryonic stem cells, heart | hsa-miR-744-5p | 2433 | 2434 |
| Embryonic stem cells, immune cells | hsa-miR-548i | 2435 | 2436 |
| Embryonic stem cells, immune cells | hsa-miR-548n | 2437 | 2438 |
| Embryonic stem cells, lipid metabolism | hsa-miR-302a-3p | 2439 | 2440 |
| Embryonic stem cells, lipid metabolism | hsa-miR-302a-5p | 2441 | 2442 |
| Embryonic stem cells, lung | hsa-let-7a-3p | 2443 | 2444 |
| Embryonic stem cells, lung | hsa-let-7a-5p | 2445 | 2446 |
| Embryonic stem cells, lung, myeloid cells | hsa-let-7a-2-3p | 2447 | 2448 |
| Embryonic stem cells, neural precursor | hsa-miR-1911-3p | 2449 | 2450 |
| Embryonic stem cells, neural precursor | hsa-miR-1911-5p | 2451 | 2452 |
| Embryonic stem cells, neural precursor | hsa-miR-1912 | 2453 | 2454 |
| Embryonic stem cells, placenta | hsa-miR-512-3p | 2455 | 2456 |
| Embryonic stem cells, placenta | hsa-miR-512-5p | 2457 | 2458 |
| Endometrial tissues | hsa-miR-196b-3p | 2459 | 2460 |
| Endometrial tissues | hsa-miR-196b-5p | 2461 | 2462 |
| Endothelial cells | hsa-miR-101-3p | 2463 | 2464 |
| Endothelial cells | hsa-miR-101-5p | 2465 | 2466 |
| Endothelial cells | hsa-miR-19a-3p | 2467 | 2468 |
| Endothelial cells | hsa-miR-19a-5p | 2469 | 2470 |
| Endothelial cells | hsa-miR-19b-1-5p | 2471 | 2472 |
| Endothelial cells | hsa-miR-19b-2-5p | 2473 | 2474 |
| Endothelial cells | hsa-miR-19b-3p | 2475 | 2476 |
| Endothelial cells | hsa-miR-217 | 2477 | 2478 |
| Endothelial cells | hsa-miR-218-1-3p | 2479 | 2480 |
| Endothelial cells | hsa-miR-222-3p | 2481 | 2482 |
| Endothelial cells | hsa-miR-222-5p | 2483 | 2484 |
| Endothelial cells | hsa-miR-361-5p | 2485 | 2486 |
| Endothelial cells | hsa-miR-421 | 2487 | 2488 |
| Endothelial cells | hsa-miR-424-3p | 2489 | 2490 |
| Endothelial cells | hsa-miR-424-5p | 2491 | 2492 |
| Endothelial cells | hsa-miR-513a-5p | 2493 | 2494 |
| Endothelial cells | hsa-miR-5739 | 2495 | 2496 |
| Endothelial cells | hsa-miR-6068 | 2497 | 2498 |
| Endothelial cells | hsa-miR-6069 | 2499 | 2500 |
| Endothelial cells | hsa-miR-6071 | 2501 | 2502 |
| Endothelial cells | hsa-miR-6072 | 2503 | 2504 |
| Endothelial cells | hsa-miR-6073 | 2505 | 2506 |
| Endothelial cells | hsa-miR-6074 | 2507 | 2508 |
| Endothelial cells | hsa-miR-6075 | 2509 | 2510 |
| Endothelial cells | hsa-miR-6076 | 2511 | 2512 |
| Endothelial cells | hsa-miR-6077 | 2513 | 2514 |
| Endothelial cells | hsa-miR-6078 | 2515 | 2516 |
| Endothelial cells | hsa-miR-6079 | 2517 | 2518 |
| Endothelial cells | hsa-miR-6080 | 2519 | 2520 |
| Endothelial cells | hsa-miR-6081 | 2521 | 2522 |
| Endothelial cells | hsa-miR-6082 | 2523 | 2524 |
| Endothelial cells | hsa-miR-6083 | 2525 | 2526 |
| Endothelial cells | hsa-miR-6084 | 2527 | 2528 |
| Endothelial cells | hsa-miR-6085 | 2529 | 2530 |
| Endothelial cells | hsa-miR-92a-1-5p | 2531 | 2532 |
| Endothelial cells | hsa-miR-92a-2-5p | 2533 | 2534 |
| Endothelial cells and CNS | hsa-miR-92a-3p | 2535 | 2536 |
| Endothelial cells and heart | hsa-miR-92b-3p | 2537 | 2538 |
| Endothelial cells and heart | hsa-miR-92b-5p | 2539 | 2540 |
| Endothelial cells, brain (astrocyte), blood | hsa-miR-23a-3p | 2541 | 2542 |
| (erythroid) | | | |
| Endothelial cells, brain (astrocyte), blood | hsa-miR-23a-5p | 2543 | 2544 |
| (erythroid) | | | |
| Endothelial cells, embryonic stem cells | hsa-miR-17-3p | 2545 | 2546 |
| Endothelial cells, immune cells | hsa-miR-221-3p | 2547 | 2548 |
| Endothelial cells, immune cells | hsa-miR-221-5p | 2549 | 2550 |
| Endothelial cells, lung | hsa-miR-126-3p | 2551 | 2552 |
| Endothelial cells, lung | hsa-miR-126-5p | 2553 | 2554 |
| Endothelial progenitor cells (epcs) | hsa-miR-508-5p | 2555 | 2556 |
| Endothelial progenitor cells, oocytes | hsa-miR-662 | 2557 | 2558 |
| Epididymis | hsa-miR-6511b-3p | 2559 | 2560 |
| Epididymis | hsa-miR-6511b-5p | 2561 | 2562 |
| Epididymis | hsa-miR-6715a-3p | 2563 | 2564 |
| Epididymis | hsa-miR-6715b-3p | 2565 | 2566 |
| Epididymis | hsa-miR-6715b-5p | 2567 | 2568 |
| Epididymis | hsa-miR-6716-3p | 2569 | 2570 |
| Epididymis | hsa-miR-6716-5p | 2571 | 2572 |
| Epididymis | hsa-miR-6717-5p | 2573 | 2574 |
| Epididymis | hsa-miR-6718-5p | 2575 | 2576 |
| Epididymis | hsa-miR-6719-3p | 2577 | 2578 |
| Epididymis | hsa-miR-6720-3p | 2579 | 2580 |
| Epididymis | hsa-miR-6721-5p | 2581 | 2582 |
| Epididymis | hsa-miR-6722-3p | 2583 | 2584 |
| Epididymis | hsa-miR-6722-5p | 2585 | 2586 |
| Epididymis | hsa-miR-6723-5p | 2587 | 2588 |
| Epididymis | hsa-miR-6724-5p | 2589 | 2590 |
| Epididymis | hsa-miR-890 | 2591 | 2592 |
| Epididymis | hsa-miR-891a | 2593 | 2594 |
| Epididymis | hsa-miR-891b | 2595 | 2596 |
| Epididymis | hsa-miR-892a | 2597 | 2598 |
| Epididymis | hsa-miR-892b | 2599 | 2600 |
| Epididymis | hsa-miR-892c-3p | 2601 | 2602 |
| Epididymis | hsa-miR-892c-5p | 2603 | 2604 |
| Epithelial cells | hsa-miR-384 | 2605 | 2606 |
| Epithelial cells | hsa-miR-429 | 2607 | 2608 |
| Epithelial cells | hsa-miR-494 | 2609 | 2610 |
| Epithelial cells, endothelial cells | hsa-let-7b-3p | 2611 | 2612 |
| (vascular) | | | |
| Epithelial cells, endothelial cells | hsa-let-7b-5p | 2613 | 2614 |
| (vascular) | | | |
| Epithelial cells, many other tissues | hsa-miR-200a-3p | 2615 | 2616 |
| Epithelial cells, many other tissues | hsa-miR-200a-5p | 2617 | 2618 |
| Epithelial cells, many other tissues | hsa-miR-200b-3p | 2619 | 2620 |
| Epithelial cells, many other tissues | hsa-miR-200b-5p | 2621 | 2622 |
| Epithelial cells, many other tissues, | hsa-miR-200c-3p | 2623 | 2624 |
| embryonic stem cells | | | |
| Epithelial cells, many other tissues, | hsa-miR-200c-5p | 2625 | 2626 |
| embryonic stem cells | | | |
| Epithelial cells, oligodendrocytes | hsa-miR-338-3p | 2627 | 2628 |
| Erythroid cells | hsa-miR-144-3p | 2629 | 2630 |
| Erythroid cells | hsa-miR-144-5p | 2631 | 2632 |
| Erythroid cells | hsa-miR-486-3p | 2633 | 2634 |
| Esophageal cell line KYSE-150R | hsa-miR-1237-3p | 2635 | 2636 |
| Esophageal cell line KYSE-150R | hsa-miR-1237-5p | 2637 | 2638 |
| Esophageal cell line KYSE-150R | hsa-miR-1539 | 2639 | 2640 |
| Female reproductive tract | hsa-miR-2115-3p | 2641 | 2642 |
| Female reproductive tract | hsa-miR-2115-5p | 2643 | 2644 |
| Female reproductive tract | hsa-miR-2277-3p | 2645 | 2646 |
| Female reproductive tract | hsa-miR-2277-5p | 2647 | 2648 |
| Female reproductive tract | hsa-miR-3689a-3p | 2649 | 2650 |
| Female reproductive tract | hsa-miR-3689b-5p | 2651 | 2652 |
| Female reproductive tract | hsa-miR-3907 | 2653 | 2654 |
| Female reproductive tract | hsa-miR-3908 | 2655 | 2656 |
| Female reproductive tract | hsa-miR-3909 | 2657 | 2658 |
| Female reproductive tract | hsa-miR-3910 | 2659 | 2660 |
| Female reproductive tract | hsa-miR-3912 | 2661 | 2662 |
| Female reproductive tract | hsa-miR-3915 | 2663 | 2664 |
| Female reproductive tract | hsa-miR-3916 | 2665 | 2666 |
| Female reproductive tract | hsa-miR-3917 | 2667 | 2668 |
| Female reproductive tract | hsa-miR-3918 | 2669 | 2670 |
| Female reproductive tract | hsa-miR-3919 | 2671 | 2672 |
| Female reproductive tract | hsa-miR-3920 | 2673 | 2674 |
| Female reproductive tract | hsa-miR-3921 | 2675 | 2676 |
| Female reproductive tract | hsa-miR-3923 | 2677 | 2678 |
| Female reproductive tract | hsa-miR-3924 | 2679 | 2680 |
| Female reproductive tract | hsa-miR-3926 | 2681 | 2682 |
| Female reproductive tract | hsa-miR-3928 | 2683 | 2684 |
| Female reproductive tract | hsa-miR-3929 | 2685 | 2686 |
| Female reproductive tract | hsa-miR-676-3p | 2687 | 2688 |
| Female reproductive tract | hsa-miR-676-5p | 2689 | 2690 |
| Female reproductive tract and peripheral | hsa-miR-3689a-5p | 2691 | 2692 |
| blood | | | |
| Female reproductive tract and peripheral | hsa-miR-3689b-3p | 2693 | 2694 |
| blood | | | |
| Female reproductive tract and psoriasis | hsa-miR-3927-3p | 2695 | 2696 |
| Female reproductive tract and psoriasis | hsa-miR-3927-5p | 2697 | 2698 |
| Fibroblast | hsa-miR-5787 | 2699 | 2700 |
| Frontal cortex | hsa-miR-516a-3p | 2701 | 2702 |
| Frontal cortex | hsa-miR-571 | 2703 | 2704 |
| Glia cells | hsa-miR-181d | 2705 | 2706 |
| Glioblast, brain | hsa-miR-128 | 2707 | 2708 |
| Glioblast, brain, pancreas | hsa-miR-7-1-3p | 2709 | 2710 |
| Glioblast, Embryonic stem cells, | hsa-miR-181b-3p | 2711 | 2712 |
| epidermal (keratinocytes) | | | |
| Glioblast, Embryonic stem cells, | hsa-miR-181b-5p | 2713 | 2714 |
| epidermal (keratinocytes) | | | |
| Glioblast, myeloid cells, embryonic stem | hsa-miR-181a-3p | 2715 | 2716 |
| cells | | | |
| Glioblast, myeloid cells, embryonic stem | hsa-miR-181a-5p | 2717 | 2718 |
| cells | | | |
| Glioblast, stem cells | hsa-miR-181a-2-3p | 2719 | 2720 |
| Heart (cardiomyocyte) | hsa-miR-744-3p | 2721 | 2722 |
| Heart (cardiomyocyte), muscle | hsa-miR-208a | 2723 | 2724 |
| Heart (cardiomyocyte), muscle | hsa-miR-208b | 2725 | 2726 |
| Heart and brain | hsa-miR-149-3p | 2727 | 2728 |
| Heart and brain | hsa-miR-149-5p | 2729 | 2730 |
| Heart and muscle | hsa-miR-1 | 2731 | 2732 |
| Heart, cardiac stem cells | hsa-miR-499a-3p | 2733 | 2734 |
| Heart, cardiac stem cells | hsa-miR-499a-5p | 2735 | 2736 |
| Heart, cardiac stem cells | hsa-miR-499b-3p | 2737 | 2738 |
| Heart, cardiac stem cells | hsa-miR-499b-5p | 2739 | 2740 |
| Heart, central nervous system, epithelial | hsa-miR-451a | 2741 | 2742 |
| cells | | | |
| Heart, central nervous system, epithelial | hsa-miR-451b | 2743 | 2744 |
| cells | | | |
| Heart, embryonic stem cells | hsa-miR-423-5p | 2745 | 2746 |
| Hemapoietic cells | hsa-miR-99a-3p | 2747 | 2748 |
| Hemapoietic cells | hsa-miR-99a-5p | 2749 | 2750 |
| Hemapoietic cells and embryonic stem | hsa-miR-99b-3p | 2751 | 2752 |
| cells | | | |
| Hemapoietic cells and embryonic stem | hsa-miR-99b-5p | 2753 | 2754 |
| cells | | | |
| Hematocytes, brain | hsa-miR-139-3p | 2755 | 2756 |
| Hematocytes, brain | hsa-miR-139-5p | 2757 | 2758 |
| Hematopoeitic cells | hsa-miR-10a-3p | 2759 | 2760 |
| Hematopoeitic cells | hsa-miR-10a-5p | 2761 | 2762 |
| Hematopoietic cells | hsa-miR-1184 | 2763 | 2764 |
| Hematopoietic cells | hsa-miR-148a-3p | 2765 | 2766 |
| Hematopoietic cells | hsa-miR-148a-5p | 2767 | 2768 |
| Hematopoietic cells | hsa-miR-26b-3p | 2769 | 2770 |
| Hematopoietic cells | hsa-miR-26b-5p | 2771 | 2772 |
| Hematopoietic cells | hsa-miR-345-3p | 2773 | 2774 |
| Hematopoietic cells | hsa-miR-345-5p | 2775 | 2776 |
| Hematopoietic cells | hsa-miR-377-3p | 2777 | 2778 |
| Hematopoietic cells | hsa-miR-377-5p | 2779 | 2780 |
| Hematopoietic cells (erythroid, platelet, | hsa-miR-376a-2-5p | 2781 | 2782 |
| and lymphoma) | | | |
| Hematopoietic cells (erythroid, platelet, | hsa-miR-376a-3p | 2783 | 2784 |
| and lymphoma) | | | |
| Hematopoietic cells (erythroid, platelet, | hsa-miR-376a-5p | 2785 | 2786 |
| and lymphoma) | | | |
| Hematopoietic cells (lymphoid) | hsa-miR-150-3p | 2787 | 2788 |
| Hematopoietic cells (lymphoid) | hsa-miR-150-5p | 2789 | 2790 |
| Hematopoietic cells (monocytes), brain | hsa-miR-125b-1-3p | 2791 | 2792 |
| (neuron) | | | |
| Hematopoietic cells (monocytes), brain | hsa-miR-125b-2-3p | 2793 | 2794 |
| (neuron) | | | |
| Hematopoietic cells and endothelial cells | hsa-miR-100-5p | 2795 | 2796 |
| Hematopoietic cells, adipose, smooth | hsa-let-7g-3p | 2797 | 2798 |
| muscle cells | | | |
| Hematopoietic cells, adipose, smooth | hsa-let-7g-5p | 2799 | 2800 |
| muscle cells | | | |
| Hematopoietic cells, brain (neuron) | hsa-miR-125b-5p | 2801 | 2802 |
| Hematopoietic cells, endothelial cells | hsa-miR-100-3p | 2803 | 2804 |
| Hematopoietic cells, lung, placental | hsa-miR-372 | 2805 | 2806 |
| (blood) | | | |
| Hepatocytes | hsa-miR-1303 | 2807 | 2808 |
| Hepatocytes | hsa-miR-1291 | 2809 | 2810 |
| Hepatocytes | hsa-miR-551b-3p | 2811 | 2812 |
| Hepatocytes | hsa-miR-551b-5p | 2813 | 2814 |
| Hepatocytes | hsa-miR-939-3p | 2815 | 2816 |
| Hepatocytes | hsa-miR-939-5p | 2817 | 2818 |
| Human testis | hsa-miR-920 | 2819 | 2820 |
| Human testis | hsa-miR-921 | 2821 | 2822 |
| Human testis | hsa-miR-924 | 2823 | 2824 |
| Human testis, neuronal tissues | hsa-miR-922 | 2825 | 2826 |
| Immune cells | hsa-miR-339-3p | 2827 | 2828 |
| Immune cells | hsa-miR-339-5p | 2829 | 2830 |
| Immune cells | hsa-let-7e-3p | 2831 | 2832 |
| Immune cells | hsa-let-7e-5p | 2833 | 2834 |
| Immune cells | hsa-let-7i-3p | 2835 | 2836 |
| Immune cells | hsa-let-7i-5p | 2837 | 2838 |
| Immune cells | hsa-miR-146b-3p | 2839 | 2840 |
| Immune cells | hsa-miR-182-3p | 2841 | 2842 |
| Immune cells | hsa-miR-346 | 2843 | 2844 |
| Immune cells | hsa-miR-548j | 2845 | 2846 |
| Immune cells (B-cells) | hsa-miR-151b | 2847 | 2848 |
| Immune cells (T cells) | hsa-let-7f-1-3p | 2849 | 2850 |
| Immune cells (T cells) | hsa-let-7f-2-3p | 2851 | 2852 |
| Immune cells (T cells) | hsa-let-7f-5p | 2853 | 2854 |
| Immune cells, frontal cortex | hsa-miR-548b-5p | 2855 | 2856 |
| Immune cells, frontal cortex | hsa-miR-548c-5p | 2857 | 2858 |
| Immune cells, hematopoiesis | hsa-miR-146a-3p | 2859 | 2860 |
| Immune cells, hematopoiesis | hsa-miR-146a-5p | 2861 | 2862 |
| Immune cells, pancreas | hsa-miR-214-3p | 2863 | 2864 |
| Immune cells, pancreas | hsa-miR-214-5p | 2865 | 2866 |
| Immune system | hsa-miR-29a-3p | 2867 | 2868 |
| Immune system | hsa-miR-29a-5p | 2869 | 2870 |
| Immune system | hsa-miR-29b-1-5p | 2871 | 2872 |
| Immune system | hsa-miR-29b-2-5p | 2873 | 2874 |
| Immune system | hsa-miR-29b-3p | 2875 | 2876 |
| Immune system | hsa-miR-29c-3p | 2877 | 2878 |
| Immune system | hsa-miR-29c-5p | 2879 | 2880 |
| Keratinocytes | hsa-miR-668 | 2881 | 2882 |
| Kidney | hsa-miR-192-3p | 2883 | 2884 |
| Kidney | hsa-miR-192-5p | 2885 | 2886 |
| Kidney | hsa-miR-324-3p | 2887 | 2888 |
| Kidney and liver/hepatocytes | hsa-miR-122-3p | 2889 | 2890 |
| Kidney and pancreatic cells | hsa-miR-30a-3p | 2891 | 2892 |
| Kidney stem cell, blood cells | hsa-miR-363-3p | 2893 | 2894 |
| Kidney stem cell, blood cells | hsa-miR-363-5p | 2895 | 2896 |
| Kidney, adipose, CNS (prefrontal cortex) | hsa-miR-30b-3p | 2897 | 2898 |
| Kidney, adipose, CNS (prefrontal cortex) | hsa-miR-30b-5p | 2899 | 2900 |
| Kidney, adipose, CNS (prefrontal cortex) | hsa-miR-30c-1-3p | 2901 | 2902 |
| Kidney, adipose, CNS (prefrontal cortex) | hsa-miR-30c-2-3p | 2903 | 2904 |
| Kidney, adipose, CNS (prefrontal cortex) | hsa-miR-30c-5p | 2905 | 2906 |
| Kidney, breast | hsa-miR-335-3p | 2907 | 2908 |
| Kidney, breast | hsa-miR-335-5p | 2909 | 2910 |
| Kidney, breast and endothelial cells | hsa-miR-17-5p | 2911 | 2912 |
| Kidney, cartilage, vascular smooth muscle | hsa-miR-145-3p | 2913 | 2914 |
| Kidney, cartilage, vascular smooth muscle | hsa-miR-145-5p | 2915 | 2916 |
| Kidney, endothelial cells, osteogenic cells | hsa-miR-20a-3p | 2917 | 2918 |
| Kidney, endothelial cells, osteogenic cells | hsa-miR-20a-5p | 2919 | 2920 |
| Kidney, heart, lung, endothelial cells | hsa-miR-296-3p | 2921 | 2922 |
| Kidney, heart, vascular endothelial cells | hsa-miR-210 | 2923 | 2924 |
| Kidney, liver | hsa-miR-194-3p | 2925 | 2926 |
| Kidney, liver | hsa-miR-194-5p | 2927 | 2928 |
| Kidney, pancreas | hsa-miR-216a-3p | 2929 | 2930 |
| Kidney, pancreas | hsa-miR-216a-5p | 2931 | 2932 |
| Lipid metabolism | hsa-miR-33b-3p | 2933 | 2934 |
| Lipid metabolism | hsa-miR-33b-5p | 2935 | 2936 |
| Lipid metabolism | hsa-miR-378b | 2937 | 2938 |
| Lipid metabolism | hsa-miR-378c | 2939 | 2940 |
| Lipid metabolism | hsa-miR-378d | 2941 | 2942 |
| Lipid metabolism | hsa-miR-378e | 2943 | 2944 |
| Lipid metabolism | hsa-miR-378f | 2945 | 2946 |
| Lipid metabolism | hsa-miR-378g | 2947 | 2948 |
| Lipid metabolism | hsa-miR-378h | 2949 | 2950 |
| Lipid metabolism | hsa-miR-378i | 2951 | 2952 |
| Lipid metabolism | hsa-miR-378j | 2953 | 2954 |
| Lipid metabolism | hsa-miR-613 | 2955 | 2956 |
| Liver (hepatocytes) | hsa-miR-152 | 2957 | 2958 |
| Liver (hepatocytes) | hsa-miR-1228-3p | 2959 | 2960 |
| Liver (hepatocytes) | hsa-miR-1228-5p | 2961 | 2962 |
| Liver (hepatocytes) | hsa-miR-1249 | 2963 | 2964 |
| Liver (hepatocytes) | hsa-miR-448 | 2965 | 2966 |
| Liver (hepatocytes) | hsa-miR-557 | 2967 | 2968 |
| Liver (hepatocytes), circulating (blood) | hsa-miR-625-3p | 2969 | 2970 |
| Liver (hepatocytes), circulating (blood) | hsa-miR-625-5p | 2971 | 2972 |
| Liver (hepatocytes) | hsa-miR-129-5p | 2973 | 2974 |
| Liver (hepatocytes) | hsa-miR-581 | 2975 | 2976 |
| Liver, cardiomyocytes | hsa-miR-199a-5p | 2977 | 2978 |
| Liver, embryonic body cells, | hsa-miR-199a-3p | 2979 | 2980 |
| cardiomyocytes | | | |
| Liver, osteoblast | hsa-miR-199b-3p | 2981 | 2982 |
| Liver, osteoblast | hsa-miR-199b-5p | 2983 | 2984 |
| Liver (hepatocytes) | hsa-miR-122-5p | 2985 | 2986 |
| Lung (epithelial) | hsa-miR-18b-3p | 2987 | 2988 |
| Lung (epithelial) | hsa-miR-18b-5p | 2989 | 2990 |
| Lung (epithelial) | hsa-miR-337-3p | 2991 | 2992 |
| Lung (epithelial) | hsa-miR-337-5p | 2993 | 2994 |
| Lung (epithelial) | hsa-miR-134 | 2995 | 2996 |
| Lung and endothelial cells | hsa-miR-18a-3p | 2997 | 2998 |
| Lung and endothelial cells | hsa-miR-18a-5p | 2999 | 3000 |
| Lung, epidermal cells (keratinocytes) | hsa-miR-130b-3p | 3001 | 3002 |
| Lung, epidermal cells (keratinocytes) | hsa-miR-130b-5p | 3003 | 3004 |
| Lung, immune cells | hsa-miR-182-5p | 3005 | 3006 |
| Lung, liver, endothelial cells | hsa-miR-296-5p | 3007 | 3008 |
| Lung, monocytes, vascular endothelial | hsa-miR-130a-3p | 3009 | 3010 |
| cells | | | |
| Lung, monocytes, vascular endothelial | hsa-miR-130a-5p | 3011 | 3012 |
| cells | | | |
| Lung, placenta | hsa-miR-127-3p | 3013 | 3014 |
| Lung, placenta (islet) | hsa-miR-127-5p | 3015 | 3016 |
| Lymphatic endothelial cells | hsa-miR-1236-3p | 3017 | 3018 |
| Lymphatic endothelial cells | hsa-miR-1236-5p | 3019 | 3020 |
| Lymphoblastic leukemia | hsa-miR-5000-3p | 3021 | 3022 |
| Lymphoblastic leukemia | hsa-miR-5000-5p | 3023 | 3024 |
| Lymphoblastic leukemia | hsa-miR-5006-3p | 3025 | 3026 |
| Lymphoblastic leukemia | hsa-miR-5006-5p | 3027 | 3028 |
| Lymphoblastic leukemia | hsa-miR-5186 | 3029 | 3030 |
| Lymphoblastic leukemia | hsa-miR-5188 | 3031 | 3032 |
| Lymphoblastic leukemia | hsa-miR-5189 | 3033 | 3034 |
| Lymphoblastic leukemia | hsa-miR-5190 | 3035 | 3036 |
| Lymphoblastic leukemia | hsa-miR-5191 | 3037 | 3038 |
| Lymphoblastic leukemia | hsa-miR-5192 | 3039 | 3040 |
| Lymphoblastic leukemia | hsa-miR-5193 | 3041 | 3042 |
| Lymphoblastic leukemia | hsa-miR-5194 | 3043 | 3044 |
| Lymphoblastic leukemia | hsa-miR-5195-3p | 3045 | 3046 |
| Lymphoblastic leukemia | hsa-miR-5195-5p | 3047 | 3048 |
| Lymphoblastic leukemia | hsa-miR-5196-3p | 3049 | 3050 |
| Lymphoblastic leukemia | hsa-miR-5196-5p | 3051 | 3052 |
| Lymphoblastic leukemia | hsa-miR-5197-3p | 3053 | 3054 |
| Lymphoblastic leukemia | hsa-miR-5197-5p | 3055 | 3056 |
| Lymphoblastic leukemia, skin (psoriasis) | hsa-miR-5187-3p | 3057 | 3058 |
| Lymphoblastic leukemia, skin (psoriasis) | hsa-miR-5187-5p | 3059 | 3060 |
| Lymphocyte, blood, hematopoietic tissues | hsa-miR-15a-3p | 3061 | 3062 |
| (spleen) | | | |
| Lymphocyte, blood, hematopoietic tissues | hsa-miR-15a-5p | 3063 | 3064 |
| (spleen) | | | |
| Lymphocyte, blood, hematopoietic tissues | hsa-miR-15b-3p | 3065 | 3066 |
| (spleen) | | | |
| Lymphocyte, blood, hematopoietic tissues | hsa-miR-15b-5p | 3067 | 3068 |
| (spleen) | | | |
| Lymphocyte, blood, hematopoietic tissues | hsa-miR-16-2-3p | 3069 | 3070 |
| (spleen) | | | |
| Lymphocytes | hsa-miR-331-5p | 3071 | 3072 |
| Macrophage | hsa-miR-147a | 3073 | 3074 |
| Macrophage | hsa-miR-147b | 3075 | 3076 |
| Many tissues and brain hepatocytes/liver | hsa-miR-107 | 3077 | 3078 |
| Many tissues/cells, semen | hsa-miR-193b-3p | 3079 | 3080 |
| Many tissues/cells, semen | hsa-miR-193b-5p | 3081 | 3082 |
| Melanocytes | hsa-miR-211-3p | 3083 | 3084 |
| Melanocytes | hsa-miR-211-5p | 3085 | 3086 |
| Melanoma miRNAome | hsa-miR-548s | 3087 | 3088 |
| Melanoma miRNAome | hsa-miR-548t-3p | 3089 | 3090 |
| Melanoma miRNAome | hsa-miR-548t-5p | 3091 | 3092 |
| Melanoma miRNAome | hsa-miR-548u | 3093 | 3094 |
| Melanoma miRNAome | hsa-miR-548w | 3095 | 3096 |
| Melanoma miRNAome | hsa-miR-3116 | 3097 | 3098 |
| Melanoma miRNAome | hsa-miR-3117-3p | 3099 | 3100 |
| Melanoma miRNAome | hsa-miR-3117-5p | 3101 | 3102 |
| Melanoma miRNAome | hsa-miR-3118 | 3103 | 3104 |
| Melanoma miRNAome | hsa-miR-3119 | 3105 | 3106 |
| Melanoma miRNAome | hsa-miR-3120-3p | 3107 | 3108 |
| Melanoma miRNAome | hsa-miR-3120-5p | 3109 | 3110 |
| Melanoma miRNAome | hsa-miR-3121-3p | 3111 | 3112 |
| Melanoma miRNAome | hsa-miR-3121-5p | 3113 | 3114 |
| Melanoma miRNAome | hsa-miR-3122 | 3115 | 3116 |
| Melanoma miRNAome | hsa-miR-3123 | 3117 | 3118 |
| Melanoma miRNAome | hsa-miR-3125 | 3119 | 3120 |
| Melanoma miRNAome | hsa-miR-3127-3p | 3121 | 3122 |
| Melanoma miRNAome | hsa-miR-3127-5p | 3123 | 3124 |
| Melanoma miRNAome | hsa-miR-3128 | 3125 | 3126 |
| Melanoma miRNAome | hsa-miR-3131 | 3127 | 3128 |
| Melanoma miRNAome | hsa-miR-3132 | 3129 | 3130 |
| Melanoma miRNAome | hsa-miR-3133 | 3131 | 3132 |
| Melanoma miRNAome | hsa-miR-3134 | 3133 | 3134 |
| Melanoma miRNAome | hsa-miR-3135a | 3135 | 3136 |
| Melanoma miRNAome | hsa-miR-3136-3p | 3137 | 3138 |
| Melanoma miRNAome | hsa-miR-3136-5p | 3139 | 3140 |
| Melanoma miRNAome | hsa-miR-3137 | 3141 | 3142 |
| Melanoma miRNAome | hsa-miR-3139 | 3143 | 3144 |
| Melanoma miRNAome | hsa-miR-3141 | 3145 | 3146 |
| Melanoma miRNAome | hsa-miR-3143 | 3147 | 3148 |
| Melanoma miRNAome | hsa-miR-3145-3p | 3149 | 3150 |
| Melanoma miRNAome | hsa-miR-3145-5p | 3151 | 3152 |
| Melanoma miRNAome | hsa-miR-3146 | 3153 | 3154 |
| Melanoma miRNAome | hsa-miR-3147 | 3155 | 3156 |
| Melanoma miRNAome | hsa-miR-3148 | 3157 | 3158 |
| Melanoma miRNAome | hsa-miR-3150a-3p | 3159 | 3160 |
| Melanoma miRNAome | hsa-miR-3150a-5p | 3161 | 3162 |
| Melanoma miRNAome | hsa-miR-3150b-3p | 3163 | 3164 |
| Melanoma miRNAome | hsa-miR-3150b-5p | 3165 | 3166 |
| Melanoma miRNAome | hsa-miR-3151 | 3167 | 3168 |
| Melanoma miRNAome | hsa-miR-3153 | 3169 | 3170 |
| Melanoma miRNAome | hsa-miR-3154 | 3171 | 3172 |
| Melanoma miRNAome | hsa-miR-3155a | 3173 | 3174 |
| Melanoma miRNAome | hsa-miR-3156-3p | 3175 | 3176 |
| Melanoma miRNAome | hsa-miR-3156-5p | 3177 | 3178 |
| Melanoma miRNAome | hsa-miR-3157-3p | 3179 | 3180 |
| Melanoma miRNAome | hsa-miR-3157-5p | 3181 | 3182 |
| Melanoma miRNAome | hsa-miR-3159 | 3183 | 3184 |
| Melanoma miRNAome | hsa-miR-3160-3p | 3185 | 3186 |
| Melanoma miRNAome | hsa-miR-3160-5p | 3187 | 3188 |
| Melanoma miRNAome | hsa-miR-3161 | 3189 | 3190 |
| Melanoma miRNAome | hsa-miR-3162-3p | 3191 | 3192 |
| Melanoma miRNAome | hsa-miR-3162-5p | 3193 | 3194 |
| Melanoma miRNAome | hsa-miR-3163 | 3195 | 3196 |
| Melanoma miRNAome | hsa-miR-3164 | 3197 | 3198 |
| Melanoma miRNAome | hsa-miR-3165 | 3199 | 3200 |
| Melanoma miRNAome | hsa-miR-3166 | 3201 | 3202 |
| Melanoma miRNAome | hsa-miR-3168 | 3203 | 3204 |
| Melanoma miRNAome | hsa-miR-3169 | 3205 | 3206 |
| Melanoma miRNAome | hsa-miR-3170 | 3207 | 3208 |
| Melanoma miRNAome | hsa-miR-3173-3p | 3209 | 3210 |
| Melanoma miRNAome | hsa-miR-3173-5p | 3211 | 3212 |
| Melanoma miRNAome | hsa-miR-3174 | 3213 | 3214 |
| Melanoma miRNAome | hsa-miR-3176 | 3215 | 3216 |
| Melanoma miRNAome | hsa-miR-3177-3p | 3217 | 3218 |
| Melanoma miRNAome | hsa-miR-3177-5p | 3219 | 3220 |
| Melanoma miRNAome | hsa-miR-3178 | 3221 | 3222 |
| Melanoma miRNAome | hsa-miR-3179 | 3223 | 3224 |
| Melanoma miRNAome | hsa-miR-3181 | 3225 | 3226 |
| Melanoma miRNAome | hsa-miR-3182 | 3227 | 3228 |
| Melanoma miRNAome | hsa-miR-3183 | 3229 | 3230 |
| Melanoma miRNAome | hsa-miR-3184-3p | 3231 | 3232 |
| Melanoma miRNAome | hsa-miR-3184-5p | 3233 | 3234 |
| Melanoma miRNAome | hsa-miR-3185 | 3235 | 3236 |
| Melanoma miRNAome | hsa-miR-3187-3p | 3237 | 3238 |
| Melanoma miRNAome | hsa-miR-3187-5p | 3239 | 3240 |
| Melanoma miRNAome | hsa-miR-3188 | 3241 | 3242 |
| Melanoma miRNAome | hsa-miR-3189-3p | 3243 | 3244 |
| Melanoma miRNAome | hsa-miR-3189-5p | 3245 | 3246 |
| Melanoma miRNAome | hsa-miR-3190-3p | 3247 | 3248 |
| Melanoma miRNAome | hsa-miR-3190-5p | 3249 | 3250 |
| Melanoma miRNAome | hsa-miR-3191-3p | 3251 | 3252 |
| Melanoma miRNAome | hsa-miR-3191-5p | 3253 | 3254 |
| Melanoma miRNAome | hsa-miR-3192 | 3255 | 3256 |
| Melanoma miRNAome | hsa-miR-3193 | 3257 | 3258 |
| Melanoma miRNAome | hsa-miR-3194-3p | 3259 | 3260 |
| Melanoma miRNAome | hsa-miR-3194-5p | 3261 | 3262 |
| Melanoma miRNAome | hsa-miR-3195 | 3263 | 3264 |
| Melanoma miRNAome | hsa-miR-3197 | 3265 | 3266 |
| Melanoma miRNAome | hsa-miR-3198 | 3267 | 3268 |
| Melanoma miRNAome | hsa-miR-3199 | 3269 | 3270 |
| Melanoma miRNAome, | hsa-miR-3201 | 3271 | 3272 |
| Melanoma miRNAome, epithelial cell | hsa-miR-3202 | 3273 | 3274 |
| BEAS2B | | | |
| Melanoma miRNAome, ovary | hsa-miR-3124-3p | 3275 | 3276 |
| Melanoma miRNAome, ovary | hsa-miR-3124-5p | 3277 | 3278 |
| Melanoma miRNAome, ovary | hsa-miR-3126-3p | 3279 | 3280 |
| Melanoma miRNAome, ovary | hsa-miR-3126-5p | 3281 | 3282 |
| Melanoma miRNAome, ovary | hsa-miR-3129-3p | 3283 | 3284 |
| Melanoma miRNAome, ovary | hsa-miR-3129-5p | 3285 | 3286 |
| Melanoma miRNAome, ovary | hsa-miR-3130-3p | 3287 | 3288 |
| Melanoma miRNAome, ovary | hsa-miR-3130-5p | 3289 | 3290 |
| Melanoma miRNAome, ovary | hsa-miR-3138 | 3291 | 3292 |
| Melanoma miRNAome, ovary | hsa-miR-3140-3p | 3293 | 3294 |
| Melanoma miRNAome, ovary | hsa-miR-3140-5p | 3295 | 3296 |
| Melanoma miRNAome, ovary | hsa-miR-3144-3p | 3297 | 3298 |
| Melanoma miRNAome, ovary | hsa-miR-3144-5p | 3299 | 3300 |
| Melanoma miRNAome, ovary | hsa-miR-3149 | 3301 | 3302 |
| Melanoma miRNAome, ovary | hsa-miR-3152-3p | 3303 | 3304 |
| Melanoma miRNAome, ovary | hsa-miR-3152-5p | 3305 | 3306 |
| Melanoma miRNAome, ovary | hsa-miR-3158-3p | 3307 | 3308 |
| Melanoma miRNAome, ovary | hsa-miR-3158-5p | 3309 | 3310 |
| Melanoma miRNAome, ovary | hsa-miR-3167 | 3311 | 3312 |
| Melanoma miRNAome, ovary | hsa-miR-3171 | 3313 | 3314 |
| Melanoma miRNAome, ovary | hsa-miR-3175 | 3315 | 3316 |
| Melanoma miRNAome, ovary | hsa-miR-3180 | 3317 | 3318 |
| Melanoma miRNAome, ovary | hsa-miR-3186-3p | 3319 | 3320 |
| Melanoma miRNAome, ovary | hsa-miR-3186-5p | 3321 | 3322 |
| Melanoma miRNAome, ovary | hsa-miR-3200-3p | 3323 | 3324 |
| Melanoma miRNAome, ovary | hsa-miR-3200-5p | 3325 | 3326 |
| Melanoma miRNAome, immune cells | hsa-miR-3142 | 3327 | 3328 |
| Mesenchymal stem cells | hsa-miR-489 | 3329 | 3330 |
| Mesothelial cells | hsa-miR-589-3p | 3331 | 3332 |
| Mesothelial cells | hsa-miR-589-5p | 3333 | 3334 |
| Monocytes | hsa-miR-1279 | 3335 | 3336 |
| Monocytes | hsa-miR-542-3p | 3337 | 3338 |
| Multiple cell types | hsa-miR-1289 | 3339 | 3340 |
| Multiple cell types | hsa-miR-129-1-3p | 3341 | 3342 |
| Multiple cell types | hsa-miR-129-2-3p | 3343 | 3344 |
| Muscle (cardiac and skeletal) | hsa-miR-206 | 3345 | 3346 |
| Muscle (myoblasts) | hsa-miR-374a-3p | 3347 | 3348 |
| Muscle (myoblasts) | hsa-miR-374a-5p | 3349 | 3350 |
| Muscle (myoblasts) | hsa-miR-374b-3p | 3351 | 3352 |
| Muscle (myoblasts) | hsa-miR-374b-5p | 3353 | 3354 |
| Muscle (myoblasts) | hsa-miR-374c-3p | 3355 | 3356 |
| Muscle (myoblasts) | hsa-miR-374c-5p | 3357 | 3358 |
| Muscle, heart, epithelial cells (lung) | hsa-miR-133a | 3359 | 3360 |
| Muscle, heart, epithelial cells (lung) | hsa-miR-133b | 3361 | 3362 |
| Myeloid cell and glia cells | hsa-miR-30e-5p | 3563 | 3364 |
| Myeloid cells | hsa-miR-223-3p | 3365 | 3366 |
| Myeloid cells | hsa-miR-223-5p | 3367 | 3368 |
| Myeloid cells | hsa-miR-27a-3p | 3369 | 3370 |
| Myeloid cells | hsa-miR-27a-5p | 3371 | 3372 |
| Myeloid cells and blood | hsa-miR-23b-3p | 3373 | 3374 |
| Myeloid cells and blood | hsa-miR-23b-5p | 3375 | 3376 |
| Myeloid cells and glia cells | hsa-miR-30e-3p | 3377 | 3378 |
| Myeloid cells and lung | hsa-miR-24-1-5p | 3379 | 3380 |
| Myeloid cells and lung | hsa-miR-24-2-5p | 3381 | 3382 |
| Myeloid cells and lung | hsa-miR-24-3p | 3383 | 3384 |
| Myeloid cells and vascular endothelial | hsa-miR-27b-3p | 3385 | 3386 |
| cells | | | |
| Myeloid cells and vascular endothelial | hsa-miR-27b-5p | 3387 | 3388 |
| cells | | | |
| Myeloid cells, hematopoiesis, ARC cells | hsa-miR-142-3p | 3389 | 3390 |
| Myeloid cells, hematopoiesis, ARC cells | hsa-miR-142-5p | 3391 | 3392 |
| Myeloid cells, pancreas (islet) | hsa-miR-493-3p | 3393 | 3394 |
| Myeloid cells, pancreas (islet) | hsa-miR-493-5p | 3395 | 3396 |
| Myoblast | hsa-miR-432-3p | 3397 | 3398 |
| Myoblast | hsa-miR-432-5p | 3399 | 3400 |
| Myoblast | hsa-miR-452-3p | 3401 | 3402 |
| Myoblast | hsa-miR-452-5p | 3403 | 3404 |
| Myoblast | hsa-miR-659-3p | 3405 | 3406 |
| Myoblast | hsa-miR-659-5p | 3407 | 3408 |
| Myoblast | hsa-miR-660-3p | 3409 | 3410 |
| Myoblast | hsa-miR-660-5p | 3411 | 3412 |
| Neural cells | hsa-miR-320e | 3413 | 3414 |
| Neuroblastoma | hsa-miR-3713 | 3415 | 3416 |
| Neuroblastoma | hsa-miR-3714 | 3417 | 3418 |
| Neurons | hsa-miR-148b-3p | 3419 | 3420 |
| Neurons | hsa-miR-148b-5p | 3421 | 3422 |
| Neuron, blood | hsa-miR-328 | 3423 | 3424 |
| Neuron, fetal liver | hsa-miR-151a-3p | 3425 | 3426 |
| Neuron, fetal liver | hsa-miR-151a-5p | 3427 | 3428 |
| Neurons | hsa-miR-323a-3p | 3429 | 3430 |
| Neurons | hsa-miR-323a-5p | 3431 | 3432 |
| Neurons | hsa-miR-324-5p | 3433 | 3434 |
| Neurons | hsa-miR-326 | 3435 | 3436 |
| Neurons, placenta | hsa-miR-325 | 3437 | 3438 |
| Oligodendrocytes | hsa-miR-1250 | 3439 | 3440 |
| Oligodendrocytes | hsa-miR-3065-3p | 3441 | 3442 |
| Oligodendrocytes | hsa-miR-3065-5p | 3443 | 3444 |
| Oligodendrocytes | hsa-miR-338-5p | 3445 | 3446 |
| Oligodendrocytes | hsa-miR-657 | 3447 | 3448 |
| Oocyte | hsa-miR-602 | 3449 | 3450 |
| Oocyte and prostate | hsa-miR-297 | 3451 | 3452 |
| Osteoblasts | hsa-miR-300 | 3453 | 3454 |
| Osteoblasts | hsa-miR-3960 | 3455 | 3456 |
| Osteoblasts | hsa-miR-764 | 3457 | 3458 |
| Osteoblasts | hsa-miR-2861 | 3459 | 3460 |
| Osteoblasts, heart | hsa-miR-186-3p | 3461 | 3462 |
| Osteoblasts, heart | hsa-miR-186-5p | 3463 | 3464 |
| Osteogenic cells | hsa-miR-106a-3p | 3465 | 3466 |
| Osteogenic cells | hsa-miR-106a-5p | 3467 | 3468 |
| Osteogenic cells | hsa-miR-20b-3p | 3469 | 3470 |
| Osteogenic cells | hsa-miR-20b-5p | 3471 | 3472 |
| Ovary | hsa-miR-503-3p | 3473 | 3474 |
| Ovary | hsa-miR-503-5p | 3475 | 3476 |
| Ovary, female reproductive tract | hsa-miR-2114-3p | 3477 | 3478 |
| Ovary, female reproductive tract | hsa-miR-2114-5p | 3479 | 3480 |
| Ovary, lipid metabolism | hsa-miR-378a-3p | 3481 | 3482 |
| Ovary, placenta/trophoblast, lipid | hsa-miR-378a-5p | 3483 | 3484 |
| metabolism | | | |
| Pancreas (islet) | hsa-miR-375 | 3485 | 3486 |
| Pancreatic cells | hsa-miR-105-3p | 3487 | 3488 |
| Pancreatic cells | hsa-miR-105-5p | 3489 | 3490 |
| Pancreatic cells, endometrial tissues, | hsa-miR-196a-3p | 3491 | 3492 |
| mesenchymal stem cells | | | |
| Pancreatic cells, endometrial tissues, | hsa-miR-196a-5p | 3493 | 3494 |
| mesenchymal stem cells | | | |
| Pancreatic islet, lipid metabolism | hsa-miR-33a-3p | 3495 | 3496 |
| Pancreatic islet, lipid metabolism | hsa-miR-33a-5p | 3497 | 3498 |
| Periodontal tissue | hsa-miR-1260a | 3499 | 3500 |
| Periodontal tissue | hsa-miR-1260b | 3501 | 3502 |
| Peripheral blood | hsa-miR-3667-3p | 3503 | 3504 |
| Peripheral blood | hsa-miR-3667-5p | 3505 | 3506 |
| Peripheral blood | hsa-miR-3668 | 3507 | 3508 |
| Peripheral blood | hsa-miR-3669 | 3509 | 3510 |
| Peripheral blood | hsa-miR-3670 | 3511 | 3512 |
| Peripheral blood | hsa-miR-3671 | 3513 | 3514 |
| Peripheral blood | hsa-miR-3672 | 3515 | 3516 |
| Peripheral blood | hsa-miR-3673 | 3517 | 3518 |
| Peripheral blood | hsa-miR-3674 | 3519 | 3520 |
| Peripheral blood | hsa-miR-3675-3p | 3521 | 3522 |
| Peripheral blood | hsa-miR-3675-5p | 3523 | 3524 |
| Peripheral blood | hsa-miR-3676-3p | 3525 | 3526 |
| Peripheral blood | hsa-miR-3676-5p | 3527 | 3528 |
| Peripheral blood | hsa-miR-3677-3p | 3529 | 3530 |
| Peripheral blood | hsa-miR-3677-5p | 3531 | 3532 |
| Peripheral blood | hsa-miR-3678-3p | 3533 | 3534 |
| Peripheral blood | hsa-miR-3678-5p | 3535 | 3536 |
| Peripheral blood | hsa-miR-3679-3p | 3537 | 3538 |
| Peripheral blood | hsa-miR-3679-5p | 3539 | 3540 |
| Peripheral blood | hsa-miR-3680-3p | 3541 | 3542 |
| Peripheral blood | hsa-miR-3680-5p | 3543 | 3544 |
| Peripheral blood | hsa-miR-3681-3p | 3545 | 3546 |
| Peripheral blood | hsa-miR-3681-5p | 3547 | 3548 |
| Peripheral blood | hsa-miR-3682-3p | 3549 | 3550 |
| Peripheral blood | hsa-miR-3682-5p | 3551 | 3552 |
| Peripheral blood | hsa-miR-3683 | 3553 | 3554 |
| Peripheral blood | hsa-miR-3684 | 3555 | 3556 |
| Peripheral blood | hsa-miR-3685 | 3557 | 3558 |
| Peripheral blood | hsa-miR-3686 | 3559 | 3560 |
| Peripheral blood | hsa-miR-3687 | 3561 | 3562 |
| Peripheral blood | hsa-miR-3690 | 3563 | 3564 |
| Peripheral blood | hsa-miR-3691-3p | 3565 | 3566 |
| Peripheral blood | hsa-miR-3691-5p | 3567 | 3568 |
| Peripheral blood | hsa-miR-3692-3p | 3569 | 3570 |
| Peripheral blood | hsa-miR-3692-5p | 3571 | 3572 |
| Placenta | hsa-miR-1182 | 3573 | 3574 |
| Placenta | hsa-miR-1185-1-3p | 3575 | 3576 |
| Placenta | hsa-miR-1185-2-3p | 3577 | 3578 |
| Placenta | hsa-miR-1185-5p | 3579 | 3580 |
| Placenta | hsa-miR-1283 | 3581 | 3582 |
| Placenta | hsa-miR-1323 | 3583 | 3584 |
| Placenta | hsa-miR-515-5p | 3585 | 3586 |
| Placenta | hsa-miR-516a-5p | 3587 | 3588 |
| Placenta | hsa-miR-517-5p | 3589 | 3590 |
| Placenta | hsa-miR-517a-3p | 3591 | 3592 |
| Placenta | hsa-miR-517b-3p | 3593 | 3594 |
| Placenta | hsa-miR-517c-3p | 3595 | 3596 |
| Placenta | hsa-miR-518b | 3597 | 3598 |
| Placenta | hsa-miR-518c-3p | 3599 | 3600 |
| Placenta | hsa-miR-518c-5p | 3601 | 3602 |
| Placenta | hsa-miR-518f-3p | 3603 | 3604 |
| Placenta | hsa-miR-518f-5p | 3605 | 3606 |
| Placenta | hsa-miR-519a-3p | 3607 | 3608 |
| Placenta | hsa-miR-519a-5p | 3609 | 3610 |
| Placenta | hsa-miR-519d | 3611 | 3612 |
| Placenta | hsa-miR-519e-3p | 3613 | 3614 |
| Placenta | hsa-miR-519e-5p | 3615 | 3616 |
| Placenta | hsa-miR-520a-3p | 3617 | 3618 |
| Placenta | hsa-miR-520a-5p | 3619 | 3620 |
| Placental specific | hsa-miR-520h | 3621 | 3622 |
| Placental specific | hsa-miR-524-5p | 3623 | 3624 |
| Placental specific | hsa-miR-525-3p | 3625 | 3626 |
| Placental specific | hsa-miR-525-5p | 3627 | 3628 |
| Placental specific | hsa-miR-526a | 3629 | 3630 |
| Placental specific | hsa-miR-526b-3p | 3631 | 3632 |
| Placental specific | hsa-miR-526b-5p | 3633 | 3634 |
| Plasma | hsa-miR-422a | 3635 | 3636 |
| Platelet | hsa-miR-495-3p | 3637 | 3638 |
| Platelet | hsa-miR-495-5p | 3639 | 3640 |
| Renal epithelial cells | hsa-miR-382-3p | 3641 | 3642 |
| Renal epithelial cells | hsa-miR-382-5p | 3643 | 3644 |
| Reproductive tracts | hsa-miR-3605-3p | 3645 | 3646 |
| Reproductive tracts | hsa-miR-3605-5p | 3647 | 3648 |
| Salivary gland | hsa-miR-5100 | 3649 | 3650 |
| Salivary gland | hsa-miR-5571-3p | 3651 | 3652 |
| Salivary gland | hsa-miR-5571-5p | 3653 | 3654 |
| Salivary gland | hsa-miR-5572 | 3655 | 3656 |
| Sarcoma | hsa-miR-1180 | 3657 | 3658 |
| Semen | hsa-miR-574-5p | 3659 | 3660 |
| Serum | hsa-miR-1233-1-5p | 3661 | 3662 |
| Serum | hsa-miR-1233-3p | 3663 | 3664 |
| Serum | hsa-miR-371a-3p | 3665 | 3666 |
| Serum | hsa-miR-371a-5p | 3667 | 3668 |
| Serum | hsa-miR-371b-3p | 3669 | 3670 |
| Serum | hsa-miR-371b-5p | 3671 | 3672 |
| Serum | hsa-miR-649 | 3673 | 3674 |
| Skin (epithelium) | hsa-miR-936 | 3675 | 3676 |
| Skin (epithelium) | hsa-miR-203a | 3677 | 3678 |
| Skin (epithelium) | hsa-miR-203b-3p | 3679 | 3680 |
| Skin (epithelium) | hsa-miR-203b-5p | 3681 | 3682 |
| Smooth muscle | hsa-miR-1286 | 3683 | 3684 |
| Smooth muscle, central nervous system | hsa-miR-188-3p | 3685 | 3686 |
| Smooth muscle, central nervous system | hsa-miR-188-5p | 3687 | 3688 |
| Solid tumor | hsa-miR-3646 | 3689 | 3690 |
| Solid tumor | hsa-miR-3648 | 3691 | 3692 |
| Solid tumor | hsa-miR-3649 | 3693 | 3694 |
| Solid tumor | hsa-miR-3650 | 3695 | 3696 |
| Solid tumor | hsa-miR-3651 | 3697 | 3698 |
| Solid tumor | hsa-miR-3652 | 3699 | 3700 |
| Solid tumor | hsa-miR-3653 | 3701 | 3702 |
| Solid tumor | hsa-miR-3654 | 3703 | 3704 |
| Solid tumor | hsa-miR-3655 | 3705 | 3706 |
| Solid tumor | hsa-miR-3656 | 3707 | 3708 |
| Solid tumor | hsa-miR-3657 | 3709 | 3710 |
| Solid tumor | hsa-miR-3658 | 3711 | 3712 |
| Stem cells (adipose) | hsa-miR-138-2-3p | 3713 | 3714 |
| Stem cells (adipose) | hsa-miR-138-5p | 3715 | 3716 |
| Stem cells (adipose) | hsa-miR-369-3p | 3717 | 3718 |
| Stem cells (adipose) | hsa-miR-369-5p | 3719 | 3720 |
| Stem cells (adipose) | hsa-miR-96-3p | 3721 | 3722 |
| Stem cells (adipose) | hsa-miR-96-5p | 3723 | 3724 |
| Stem cells (adipose) | hsa-miR-486-5p | 3725 | 3726 |
| Stem cells, epidermal cells (keratinocytes) | hsa-miR-138-1-3p | 3727 | 3728 |
| Stem cells, placenta | hsa-miR-136-3p | 3729 | 3730 |
| Stem cells, placenta | hsa-miR-136-5p | 3731 | 3732 |
| T/B cells, monocytes, breast | hsa-miR-155-3p | 3733 | 3734 |
| T/B cells, monocytes, breast | hsa-miR-155-5p | 3735 | 3736 |
| Testes, brain (medulla) | hsa-miR-383 | 3737 | 3738 |
| Testis | hsa-miR-509-3-5p | 3739 | 3740 |
| T-Lymphocytes | hsa-miR-2909 | 3741 | 3742 |
| Trophoblast | hsa-miR-376c-3p | 3743 | 3744 |
| Trophoblast | hsa-miR-376c-5p | 3745 | 3746 |
| Variety of cells and tissues | hsa-miR-103b | 3747 | 3748 |
| Variety of cells and tissues | hsa-miR-141-3p | 3749 | 3750 |
| Variety of cells and tissues | hsa-miR-141-5p | 3751 | 3752 |
| Variety of cells and tissues | hsa-miR-193a-3p | 3753 | 3754 |
| Variety of cells and tissues | hsa-miR-193a-5p | 3755 | 3756 |
| Variety of cells and tissues | hsa-miR-215 | 3757 | 3758 |
| Variety of cells and tissues | hsa-miR-22-3p | 3759 | 3760 |
| Variety of cells and tissues | hsa-miR-22-5p | 3761 | 3762 |
| Variety of tissues and cells | hsa-miR-10b-3p | 3763 | 3764 |
| Variety of tissues and cells | hsa-miR-10b-5p | 3765 | 3766 |
| Variety of tissues, blood | hsa-miR-16-5p | 3767 | 3768 |
| Vascular smooth muscle | hsa-miR-143-3p | 3769 | 3770 |
| Vascular smooth muscle, T-cells | hsa-miR-143-5p | 3771 | 3772 |
| — | hsa-miR-1178-3p | 3773 | 3774 |
| — | hsa-miR-1178-5p | 3775 | 3776 |
| — | hsa-miR-1179 | 3777 | 3778 |
| — | hsa-miR-1181 | 3779 | 3780 |
| — | hsa-miR-1183 | 3781 | 3782 |
| — | hsa-miR-1193 | 3783 | 3784 |
| — | hsa-miR-1197 | 3785 | 3786 |
| — | hsa-miR-1200 | 3787 | 3788 |
| — | hsa-miR-1202 | 3789 | 3790 |
| — | hsa-miR-1203 | 3791 | 3792 |
| — | hsa-miR-1204 | 3793 | 3794 |
| — | hsa-miR-1205 | 3795 | 3796 |
| — | hsa-miR-1206 | 3797 | 3798 |
| — | hsa-miR-1207-3p | 3799 | 3800 |
| — | hsa-miR-1207-5p | 3801 | 3802 |
| — | hsa-miR-1208 | 3803 | 3804 |
| — | hsa-miR-1224-3p | 3805 | 3806 |
| — | hsa-miR-1224-5p | 3807 | 3808 |
| — | hsa-miR-1225-3p | 3809 | 3810 |
| — | hsa-miR-1225-5p | 3811 | 3812 |
| — | hsa-miR-1226-3p | 3813 | 3814 |
| — | hsa-miR-1226-5p | 3815 | 3816 |
| — | hsa-miR-1229-3p | 3817 | 3818 |
| — | hsa-miR-1229-5p | 3819 | 3820 |
| — | hsa-miR-1231 | 3821 | 3822 |
| — | hsa-miR-1238-3p | 3823 | 3824 |
| — | hsa-miR-1238-5p | 3825 | 3826 |
| — | hsa-miR-1248 | 3827 | 3828 |
| — | hsa-miR-1273c | 3829 | 3830 |
| — | hsa-miR-1273e | 3831 | 3832 |
| — | hsa-miR-1273f | 3833 | 3834 |
| — | hsa-miR-1273g-3p | 3835 | 3836 |
| — | hsa-miR-1273g-5p | 3837 | 3838 |
| — | hsa-miR-1281 | 3839 | 3840 |
| — | hsa-miR-1284 | 3841 | 3842 |
| — | hsa-miR-1285-3p | 3843 | 3844 |
| — | hsa-miR-1285-5p | 3845 | 3846 |
| — | hsa-miR-1292-3p | 3847 | 3848 |
| — | hsa-miR-1292-5p | 3849 | 3850 |
| — | hsa-miR-1295a | 3851 | 3852 |
| — | hsa-miR-1295b-3p | 3853 | 3854 |
| — | hsa-miR-1295b-5p | 3855 | 3856 |
| — | hsa-miR-1296 | 3857 | 3858 |
| — | hsa-miR-1298 | 3859 | 3860 |
| — | hsa-miR-1301 | 3861 | 3862 |
| — | hsa-miR-1302 | 3863 | 3864 |
| — | hsa-miR-1304-3p | 3865 | 3866 |
| — | hsa-miR-1304-5p | 3867 | 3868 |
| — | hsa-miR-1321 | 3869 | 3870 |
| — | hsa-miR-1322 | 3871 | 3872 |
| — | hsa-miR-1324 | 3873 | 3874 |
| — | hsa-miR-1343 | 3875 | 3876 |
| — | hsa-miR-1468 | 3877 | 3878 |
| — | hsa-miR-1469 | 3879 | 3880 |
| — | hsa-miR-1470 | 3881 | 3882 |
| — | hsa-miR-1471 | 3883 | 3884 |
| — | hsa-miR-1537 | 3885 | 3886 |
| — | hsa-miR-1825 | 3887 | 3888 |
| — | hsa-miR-1827 | 3889 | 3890 |
| — | hsa-miR-185-3p | 3891 | 3892 |
| — | hsa-miR-185-5p | 3893 | 3894 |
| — | hsa-miR-187-3p | 3895 | 3896 |
| — | hsa-miR-187-5p | 3897 | 3898 |
| — | hsa-miR-1908 | 3899 | 3900 |
| — | hsa-miR-1909-3p | 3901 | 3902 |
| — | hsa-miR-1909-5p | 3903 | 3904 |
| — | hsa-miR-191-3p | 3905 | 3906 |
| — | hsa-miR-191-5p | 3907 | 3908 |
| — | hsa-miR-1972 | 3909 | 3910 |
| — | hsa-miR-1973 | 3911 | 3912 |
| — | hsa-miR-1976 | 3913 | 3914 |
| — | hsa-miR-2052 | 3915 | 3916 |
| — | hsa-miR-2053 | 3917 | 3918 |
| — | hsa-miR-2054 | 3919 | 3920 |
| — | hsa-miR-2110 | 3921 | 3922 |
| — | hsa-miR-2116-3p | 3923 | 3924 |
| — | hsa-miR-2116-5p | 3925 | 3926 |
| — | hsa-miR-2117 | 3927 | 3928 |
| — | hsa-miR-216b | 3929 | 3930 |
| — | hsa-miR-218-2-3p | 3931 | 3932 |
| — | hsa-miR-218-5p | 3933 | 3934 |
| — | hsa-miR-2276 | 3935 | 3936 |
| — | hsa-miR-2278 | 3937 | 3938 |
| — | hsa-miR-23c | 3939 | 3940 |
| — | hsa-miR-2467-3p | 3941 | 3942 |
| — | hsa-miR-2467-5p | 3943 | 3944 |
| — | hsa-miR-2681-3p | 3945 | 3946 |
| — | hsa-miR-2681-5p | 3947 | 3948 |
| — | hsa-miR-2682-3p | 3949 | 3950 |
| — | hsa-miR-2682-5p | 3951 | 3952 |
| — | hsa-miR-2964a-3p | 3953 | 3954 |
| — | hsa-miR-2964a-5p | 3955 | 3956 |
| — | hsa-miR-298 | 3957 | 3958 |
| — | hsa-miR-299-3p | 3959 | 3960 |
| — | hsa-miR-299-5p | 3961 | 3962 |
| — | hsa-miR-301b | 3963 | 3964 |
| — | hsa-miR-302f | 3965 | 3966 |
| — | hsa-miR-3064-3p | 3967 | 3968 |
| — | hsa-miR-3064-5p | 3969 | 3970 |
| — | hsa-miR-3074-3p | 3971 | 3972 |
| — | hsa-miR-3074-5p | 3973 | 3974 |
| — | hsa-miR-3115 | 3975 | 3976 |
| — | hsa-miR-31-3p | 3977 | 3978 |
| — | hsa-miR-31-5p | 3979 | 3980 |
| — | hsa-miR-3196 | 3981 | 3982 |
| — | hsa-miR-320d | 3983 | 3984 |
| — | hsa-miR-323b-3p | 3985 | 3986 |
| — | hsa-miR-323b-5p | 3987 | 3988 |
| — | hsa-miR-330-3p | 3989 | 3990 |
| — | hsa-miR-330-5p | 3991 | 3992 |
| — | hsa-miR-331-3p | 3993 | 3994 |
| — | hsa-miR-340-3p | 3995 | 3996 |
| — | hsa-miR-362-3p | 3997 | 3998 |
| — | hsa-miR-362-5p | 3999 | 4000 |
| — | hsa-miR-365a-3p | 4001 | 4002 |
| — | hsa-miR-365a-5p | 4003 | 4004 |
| — | hsa-miR-365b-3p | 4005 | 4006 |
| — | hsa-miR-365b-5p | 4007 | 4008 |
| — | hsa-miR-3662 | 4009 | 4010 |
| — | hsa-miR-3663-3p | 4011 | 4012 |
| — | hsa-miR-3663-5p | 4013 | 4014 |
| — | hsa-miR-370 | 4015 | 4016 |
| — | hsa-miR-373-3p | 4017 | 4018 |
| — | hsa-miR-373-5p | 4019 | 4020 |
| — | hsa-miR-379-3p | 4021 | 4022 |
| — | hsa-miR-379-5p | 4023 | 4024 |
| — | hsa-miR-3935 | 4025 | 4026 |
| — | hsa-miR-3937 | 4027 | 4028 |
| — | hsa-miR-3938 | 4029 | 4030 |
| — | hsa-miR-3939 | 4031 | 4032 |
| — | hsa-miR-3941 | 4033 | 4034 |
| — | hsa-miR-3943 | 4035 | 4036 |
| — | hsa-miR-3945 | 4037 | 4038 |
| — | hsa-miR-409-3p | 4039 | 4040 |
| — | hsa-miR-409-5p | 4041 | 4042 |
| — | hsa-miR-411-3p | 4043 | 4044 |
| — | hsa-miR-411-5p | 4045 | 4046 |
| — | hsa-miR-412 | 4047 | 4048 |
| — | hsa-miR-4273 | 4049 | 4050 |
| — | hsa-miR-431-3p | 4051 | 4052 |
| — | hsa-miR-431-5p | 4053 | 4054 |
| — | hsa-miR-433 | 4055 | 4056 |
| — | hsa-miR-449c-3p | 4057 | 4058 |
| — | hsa-miR-449c-5p | 4059 | 4060 |
| — | hsa-miR-450a-3p | 4061 | 4062 |
| — | hsa-miR-450a-5p | 4063 | 4064 |
| — | hsa-miR-450b-3p | 4065 | 4066 |
| — | hsa-miR-450b-5p | 4067 | 4068 |
| — | hsa-miR-455-3p | 4069 | 4070 |
| — | hsa-miR-455-5p | 4071 | 4072 |
| — | hsa-miR-466 | 4073 | 4074 |
| — | hsa-miR-4666b | 4075 | 4076 |
| — | hsa-miR-483-3p | 4077 | 4078 |
| — | hsa-miR-484 | 4079 | 4080 |
| — | hsa-miR-485-3p | 4081 | 4082 |
| — | hsa-miR-485-5p | 4083 | 4084 |
| — | hsa-miR-487a | 4085 | 4086 |
| — | hsa-miR-487b | 4087 | 4088 |
| — | hsa-miR-488-3p | 4089 | 4090 |
| — | hsa-miR-488-5p | 4091 | 4092 |
| — | hsa-miR-490-3p | 4093 | 4094 |
| — | hsa-miR-490-5p | 4095 | 4096 |
| — | hsa-miR-491-3p | 4097 | 4098 |
| — | hsa-miR-491-5p | 4099 | 4100 |
| — | hsa-miR-492 | 4101 | 4102 |
| — | hsa-miR-497-3p | 4103 | 4104 |
| — | hsa-miR-497-5p | 4105 | 4106 |
| — | hsa-miR-498 | 4107 | 4108 |
| — | hsa-miR-4999-3p | 4109 | 4110 |
| — | hsa-miR-4999-5p | 4111 | 4112 |
| — | hsa-miR-5001-3p | 4113 | 4114 |
| — | hsa-miR-5001-5p | 4115 | 4116 |
| — | hsa-miR-5002-3p | 4117 | 4118 |
| — | hsa-miR-5002-5p | 4119 | 4120 |
| — | hsa-miR-5003-3p | 4121 | 4122 |
| — | hsa-miR-5003-5p | 4123 | 4124 |
| — | hsa-miR-5004-3p | 4125 | 4126 |
| — | hsa-miR-5004-5p | 4127 | 4128 |
| — | hsa-miR-5007-3p | 4129 | 4130 |
| — | hsa-miR-5007-5p | 4131 | 4132 |
| — | hsa-miR-5008-3p | 4133 | 4134 |
| — | hsa-miR-5008-5p | 4135 | 4136 |
| — | hsa-miR-5009-3p | 4137 | 4138 |
| — | hsa-miR-5009-5p | 4139 | 4140 |
| — | hsa-miR-500a-3p | 4141 | 4142 |
| — | hsa-miR-500a-5p | 4143 | 4144 |
| — | hsa-miR-5010-3p | 4145 | 4146 |
| — | hsa-miR-5010-5p | 4147 | 4148 |
| — | hsa-miR-5011-3p | 4149 | 4150 |
| — | hsa-miR-5011-5p | 4151 | 4152 |
| — | hsa-miR-501-3p | 4153 | 4154 |
| — | hsa-miR-501-5p | 4155 | 4156 |
| — | hsa-miR-502-3p | 4157 | 4158 |
| — | hsa-miR-502-5p | 4159 | 4160 |
| — | hsa-miR-504 | 4161 | 4162 |
| — | hsa-miR-5047 | 4163 | 4164 |
| — | hsa-miR-505-3p | 4165 | 4166 |
| — | hsa-miR-505-5p | 4167 | 4168 |
| — | hsa-miR-506-3p | 4169 | 4170 |
| — | hsa-miR-506-5p | 4171 | 4172 |
| — | hsa-miR-507 | 4173 | 4174 |
| — | hsa-miR-508-3p | 4175 | 4176 |
| — | hsa-miR-5087 | 4177 | 4178 |
| — | hsa-miR-5088 | 4179 | 4180 |
| — | hsa-miR-5089-3p | 4181 | 4182 |
| — | hsa-miR-5089-5p | 4183 | 4184 |
| — | hsa-miR-5090 | 4185 | 4186 |
| — | hsa-miR-5091 | 4187 | 4188 |
| — | hsa-miR-5092 | 4189 | 4190 |
| — | hsa-miR-5093 | 4191 | 4192 |
| — | hsa-miR-509-3p | 4193 | 4194 |
| — | hsa-miR-5094 | 4195 | 4196 |
| — | hsa-miR-5095 | 4197 | 4198 |
| — | hsa-miR-509-5p | 4199 | 4200 |
| — | hsa-miR-5096 | 4201 | 4202 |
| — | hsa-miR-513a-3p | 4203 | 4204 |
| — | hsa-miR-513b | 4205 | 4206 |
| — | hsa-miR-513c-3p | 4207 | 4208 |
| — | hsa-miR-513c-5p | 4209 | 4210 |
| — | hsa-miR-514a-3p | 4211 | 4212 |
| — | hsa-miR-514a-5p | 4213 | 4214 |
| — | hsa-miR-514b-3p | 4215 | 4216 |
| — | hsa-miR-514b-5p | 4217 | 4218 |
| — | hsa-miR-515-3p | 4219 | 4220 |
| — | hsa-miR-516b-3p | 4221 | 4222 |
| — | hsa-miR-516b-5p | 4223 | 4224 |
| — | hsa-miR-518a-3p | 4225 | 4226 |
| — | hsa-miR-518a-5p | 4227 | 4228 |
| — | hsa-miR-518d-3p | 4229 | 4230 |
| — | hsa-miR-518d-5p | 4231 | 4232 |
| — | hsa-miR-518e-3p | 4233 | 4234 |
| — | hsa-miR-518e-5p | 4235 | 4236 |
| — | hsa-miR-519b-3p | 4237 | 4238 |
| — | hsa-miR-519b-5p | 4239 | 4240 |
| — | hsa-miR-519c-3p | 4241 | 4242 |
| — | hsa-miR-519c-5p | 4243 | 4244 |
| — | hsa-miR-520b | 4245 | 4246 |
| — | hsa-miR-520c-3p | 4247 | 4248 |
| — | hsa-miR-520c-5p | 4249 | 4250 |
| — | hsa-miR-520d-3p | 4251 | 4252 |
| — | hsa-miR-520d-5p | 4253 | 4254 |
| — | hsa-miR-520e | 4255 | 4256 |
| — | hsa-miR-520f | 4257 | 4258 |
| — | hsa-miR-520g | 4259 | 4260 |
| — | hsa-miR-521 | 4261 | 4262 |
| — | hsa-miR-522-3p | 4263 | 4264 |
| — | hsa-miR-522-5p | 4265 | 4266 |
| — | hsa-miR-523-3p | 4267 | 4268 |
| — | hsa-miR-523-5p | 4269 | 4270 |
| — | hsa-miR-524-3p | 4271 | 4272 |
| — | hsa-miR-527 | 4273 | 4274 |
| — | hsa-miR-532-3p | 4275 | 4276 |
| — | hsa-miR-532-5p | 4277 | 4278 |
| — | hsa-miR-539-3p | 4279 | 4280 |
| — | hsa-miR-539-5p | 4281 | 4282 |
| — | hsa-miR-541-3p | 4283 | 4284 |
| — | hsa-miR-541-5p | 4285 | 4286 |
| — | hsa-miR-542-5p | 4287 | 4288 |
| — | hsa-miR-543 | 4289 | 4290 |
| — | hsa-miR-544a | 4291 | 4292 |
| — | hsa-miR-544b | 4293 | 4294 |
| — | hsa-miR-545-3p | 4295 | 4296 |
| — | hsa-miR-545-5p | 4297 | 4298 |
| — | hsa-miR-548 | 4299 | 4300 |
| — | hsa-miR-548-3p | 4301 | 4302 |
| — | hsa-miR-548-5p | 4303 | 4304 |
| — | hsa-miR-548ao-3p | 4305 | 4306 |
| — | hsa-miR-548ao-5p | 4307 | 4308 |
| — | hsa-miR-548ap-3p | 4309 | 4310 |
| — | hsa-miR-548ap-5p | 4311 | 4312 |
| — | hsa-miR-548aq-3p | 4313 | 4314 |
| — | hsa-miR-548aq-5p | 4315 | 4316 |
| — | hsa-miR-548ar-3p | 4317 | 4318 |
| — | hsa-miR-548ar-5p | 4319 | 4320 |
| — | hsa-miR-548as-3p | 4321 | 4322 |
| — | hsa-miR-548as-5p | 4323 | 4324 |
| — | hsa-miR-548at-3p | 4325 | 4326 |
| — | hsa-miR-548at-5p | 4327 | 4328 |
| — | hsa-miR-548au-3p | 4329 | 4330 |
| — | hsa-miR-548au-5p | 4331 | 4332 |
| — | hsa-miR-548av-3p | 4333 | 4334 |
| — | hsa-miR-548av-5p | 4335 | 4336 |
| — | hsa-miR-548aw | 4337 | 4338 |
| — | hsa-miR-548q | 4339 | 4340 |
| — | hsa-miR-548y | 4341 | 4342 |
| — | hsa-miR-550a-3-5p | 4343 | 4344 |
| — | hsa-miR-550a-3p | 4345 | 4346 |
| — | hsa-miR-550a-5p | 4347 | 4348 |
| — | hsa-miR-551a | 4349 | 4350 |
| — | hsa-miR-5579-3p | 4351 | 4352 |
| — | hsa-miR-5579-5p | 4353 | 4354 |
| — | hsa-miR-558 | 4355 | 4356 |
| — | hsa-miR-5580-3p | 4357 | 4358 |
| — | hsa-miR-5580-5p | 4359 | 4360 |
| — | hsa-miR-5581-3p | 4361 | 4362 |
| — | hsa-miR-5581-5p | 4363 | 4364 |
| — | hsa-miR-5582-3p | 4365 | 4366 |
| — | hsa-miR-5582-5p | 4367 | 4368 |
| — | hsa-miR-5583-3p | 4369 | 4370 |
| — | hsa-miR-5583-5p | 4371 | 4372 |
| — | hsa-miR-5584-3p | 4373 | 4374 |
| — | hsa-miR-5584-5p | 4375 | 4376 |
| — | hsa-miR-5585-3p | 4377 | 4378 |
| — | hsa-miR-5585-5p | 4379 | 4380 |
| — | hsa-miR-5586-3p | 4381 | 4382 |
| — | hsa-miR-5586-5p | 4383 | 4384 |
| — | hsa-miR-5587-3p | 4385 | 4386 |
| — | hsa-miR-5587-5p | 4387 | 4388 |
| — | hsa-miR-5588-3p | 4389 | 4390 |
| — | hsa-miR-5588-5p | 4391 | 4392 |
| — | hsa-miR-5589-3p | 4393 | 4394 |
| — | hsa-miR-5589-5p | 4395 | 4396 |
| — | hsa-miR-559 | 4397 | 4398 |
| — | hsa-miR-5590-3p | 4399 | 4400 |
| — | hsa-miR-5590-5p | 4401 | 4402 |
| — | hsa-miR-5591-3p | 4403 | 4404 |
| — | hsa-miR-5591-5p | 4405 | 4406 |
| — | hsa-miR-561-3p | 4407 | 4408 |
| — | hsa-miR-561-5p | 4409 | 4410 |
| — | hsa-miR-562 | 4411 | 4412 |
| — | hsa-miR-564 | 4413 | 4414 |
| — | hsa-miR-566 | 4415 | 4416 |
| — | hsa-miR-567 | 4417 | 4418 |
| — | hsa-miR-5680 | 4419 | 4420 |
| — | hsa-miR-5681a | 4421 | 4422 |
| — | hsa-miR-5681b | 4423 | 4424 |
| — | hsa-miR-5682 | 4425 | 4426 |
| — | hsa-miR-5683 | 4427 | 4428 |
| — | hsa-miR-5684 | 4429 | 4430 |
| — | hsa-miR-5685 | 4431 | 4432 |
| — | hsa-miR-5686 | 4433 | 4434 |
| — | hsa-miR-5687 | 4435 | 4436 |
| — | hsa-miR-5688 | 4437 | 4438 |
| — | hsa-miR-5689 | 4439 | 4440 |
| — | hsa-miR-569 | 4441 | 4442 |
| — | hsa-miR-5690 | 4443 | 4444 |
| — | hsa-miR-5691 | 4445 | 4446 |
| — | hsa-miR-5692a | 4447 | 4448 |
| — | hsa-miR-5692b | 4449 | 4450 |
| — | hsa-miR-5692c | 4451 | 4452 |
| — | hsa-miR-5693 | 4453 | 4454 |
| — | hsa-miR-5694 | 4455 | 4456 |
| — | hsa-miR-5695 | 4457 | 4458 |
| — | hsa-miR-5696 | 4459 | 4460 |
| — | hsa-miR-5697 | 4461 | 4462 |
| — | hsa-miR-5698 | 4463 | 4464 |
| — | hsa-miR-5699 | 4465 | 4466 |
| — | hsa-miR-5700 | 4467 | 4468 |
| — | hsa-miR-5701 | 4469 | 4470 |
| — | hsa-miR-5702 | 4471 | 4472 |
| — | hsa-miR-5703 | 4473 | 4474 |
| — | hsa-miR-570-3p | 4475 | 4476 |
| — | hsa-miR-5704 | 4477 | 4478 |
| — | hsa-miR-5705 | 4479 | 4480 |
| — | hsa-miR-570-5p | 4481 | 4482 |
| — | hsa-miR-5706 | 4483 | 4484 |
| — | hsa-miR-5707 | 4485 | 4486 |
| — | hsa-miR-5708 | 4487 | 4488 |
| — | hsa-miR-575 | 4489 | 4490 |
| — | hsa-miR-579 | 4491 | 4492 |
| — | hsa-miR-580 | 4493 | 4494 |
| — | hsa-miR-582-5p | 4495 | 4496 |
| — | hsa-miR-583 | 4497 | 4498 |
| — | hsa-miR-584-3p | 4499 | 4500 |
| — | hsa-miR-584-5p | 4501 | 4502 |
| — | hsa-miR-585 | 4503 | 4504 |
| — | hsa-miR-591 | 4505 | 4506 |
| — | hsa-miR-592 | 4507 | 4508 |
| — | hsa-miR-593-3p | 4509 | 4510 |
| — | hsa-miR-593-5p | 4511 | 4512 |
| — | hsa-miR-595 | 4513 | 4514 |
| — | hsa-miR-596 | 4515 | 4516 |
| — | hsa-miR-599 | 4517 | 4518 |
| — | hsa-miR-601 | 4519 | 4520 |
| — | hsa-miR-603 | 4521 | 4522 |
| — | hsa-miR-608 | 4523 | 4524 |
| — | hsa-miR-610 | 4525 | 4526 |
| — | hsa-miR-611 | 4527 | 4528 |
| — | hsa-miR-612 | 4529 | 4530 |
| — | hsa-miR-6124 | 4531 | 4532 |
| — | hsa-miR-6125 | 4533 | 4534 |
| — | hsa-miR-6126 | 4535 | 4536 |
| — | hsa-miR-6127 | 4537 | 4538 |
| — | hsa-miR-6128 | 4539 | 4540 |
| — | hsa-miR-6129 | 4541 | 4542 |
| — | hsa-miR-6130 | 4543 | 4544 |
| — | hsa-miR-6131 | 4545 | 4546 |
| — | hsa-miR-6132 | 4547 | 4548 |
| — | hsa-miR-6133 | 4549 | 4550 |
| — | hsa-miR-6134 | 4551 | 4552 |
| — | hsa-miR-615-3p | 4553 | 4554 |
| — | hsa-miR-615-5p | 4555 | 4556 |
| — | hsa-miR-616-3p | 4557 | 4558 |
| — | hsa-miR-6165 | 4559 | 4560 |
| — | hsa-miR-616-5p | 4561 | 4562 |
| — | hsa-miR-617 | 4563 | 4564 |
| — | hsa-miR-618 | 4565 | 4566 |
| — | hsa-miR-621 | 4567 | 4568 |
| — | hsa-miR-622 | 4569 | 4570 |
| — | hsa-miR-623 | 4571 | 4572 |
| — | hsa-miR-627 | 4573 | 4574 |
| — | hsa-miR-628-3p | 4575 | 4576 |
| — | hsa-miR-628-5p | 4577 | 4578 |
| — | hsa-miR-629-3p | 4579 | 4580 |
| — | hsa-miR-629-5p | 4581 | 4582 |
| — | hsa-miR-632 | 4583 | 4584 |
| — | hsa-miR-633 | 4585 | 4586 |
| — | hsa-miR-636 | 4587 | 4588 |
| — | hsa-miR-638 | 4589 | 4590 |
| — | hsa-miR-640 | 4591 | 4592 |
| — | hsa-miR-644a | 4593 | 4594 |
| — | hsa-miR-645 | 4595 | 4596 |
| — | hsa-miR-646 | 4597 | 4598 |
| — | hsa-miR-647 | 4599 | 4600 |
| — | hsa-miR-650 | 4601 | 4602 |
| — | hsa-miR-652-3p | 4603 | 4604 |
| — | hsa-miR-652-5p | 4605 | 4606 |
| — | hsa-miR-655 | 4607 | 4608 |
| — | hsa-miR-656 | 4609 | 4610 |
| — | hsa-miR-658 | 4611 | 4612 |
| — | hsa-miR-661 | 4613 | 4614 |
| — | hsa-miR-663a | 4615 | 4616 |
| — | hsa-miR-663b | 4617 | 4618 |
| — | hsa-miR-665 | 4619 | 4620 |
| — | hsa-miR-670 | 4621 | 4622 |
| — | hsa-miR-671-3p | 4623 | 4624 |
| — | hsa-miR-671-5p | 4625 | 4626 |
| — | hsa-miR-675-3p | 4627 | 4628 |
| — | hsa-miR-675-5p | 4629 | 4630 |
| — | hsa-miR-708-3p | 4631 | 4632 |
| — | hsa-miR-708-5p | 4633 | 4634 |
| — | hsa-miR-711 | 4635 | 4636 |
| — | hsa-miR-759 | 4637 | 4638 |
| — | hsa-miR-760 | 4639 | 4640 |
| — | hsa-miR-761 | 4641 | 4642 |
| — | hsa-miR-765 | 4643 | 4644 |
| — | hsa-miR-767-3p | 4645 | 4646 |
| — | hsa-miR-767-5p | 4647 | 4648 |
| — | hsa-miR-769-3p | 4649 | 4650 |
| — | hsa-miR-769-5p | 4651 | 4652 |
| — | hsa-miR-770-5p | 4653 | 4654 |
| — | hsa-miR-873-3p | 4655 | 4656 |
| — | hsa-miR-873-5p | 4657 | 4658 |
| — | hsa-miR-874 | 4659 | 4660 |
| — | hsa-miR-875-3p | 4661 | 4662 |
| — | hsa-miR-875-5p | 4663 | 4664 |
| — | hsa-miR-876-3p | 4665 | 4666 |
| — | hsa-miR-876-5p | 4667 | 4668 |
| — | hsa-miR-877-3p | 4669 | 4670 |
| — | hsa-miR-877-5p | 4671 | 4672 |
| — | hsa-miR-887 | 4673 | 4674 |
| — | hsa-miR-888-3p | 4675 | 4676 |
| — | hsa-miR-888-5p | 4677 | 4678 |
| — | hsa-miR-889 | 4679 | 4680 |
| — | hsa-miR-937-3p | 4681 | 4682 |
| — | hsa-miR-937-5p | 4683 | 4684 |
| — | hsa-miR-938 | 4685 | 4686 |
| — | hsa-miR-942 | 4687 | 4688 |
| — | hsa-miR-944 | 4689 | 4690 |
| — | hsa-miR-95 | 4691 | 4692 |
| — | hsa-miR-98-3p | 4693 | 4694 |
| — | hsa-miR-98-5p | 4695 | 4696 |

### Human Cells

[0217] For ameliorating Wiskott-Aldrich Syndrome (WAS) or any disorder associated with WAS gene, as described and illustrated herein, the principal targets for gene editing are human cells. For example, in the ex vivo methods, the human cells can be somatic cells, which after being modified using the techniques as described, can give rise to differentiated cells, e.g., hepatocytes or progenitor cells. For example, in the in vivo methods, the human cells may be hepatocytes, renal cells or cells from other affected organs. In some aspects, the human cells that are edited are autologous. In other aspects, the human cells that are edited are non-autologous (e.g., allogeneic).

[0218] By performing gene editing in autologous cells that are derived from and therefore already completely matched with the patient in need, it is possible to generate cells that can be safely re-introduced into the patient, and effectively give rise to a population of cells that will be effective in ameliorating one or more clinical conditions associated with the patient's disease.

[0219] Progenitor cells (also referred to as stem cells herein) are capable of both proliferation and giving rise to more progenitor cells, these in turn having the ability to generate a large number of mother cells that can in turn give rise to differentiated or differentiable daughter cells. The daughter cells themselves can be induced to proliferate and produce progeny that subsequently differentiate into one or more mature cell types, while also retaining one or more cells with parental developmental potential. The term “stem cell” refers then, to a cell with the capacity or potential, under particular circumstances, to differentiate to a more specialized or differentiated phenotype, and which retains the capacity, under certain circumstances, to proliferate without substantially differentiating. In one aspect, the term progenitor or stem cell refers to a generalized mother cell whose descendants (progeny) specialize, often in different directions, by differentiation, e.g., by acquiring completely individual characters, as occurs in progressive diversification of embryonic cells and tissues. Cellular differentiation is a complex process typically occurring through many cell divisions. A differentiated cell may derive from a multipotent cell that itself is derived from a multipotent cell, and so on. While each of these multipotent cells may be considered stem cells, the range of cell types that each can give rise to may vary considerably. Some differentiated cells also have the capacity to give rise to cells of greater developmental potential. Such capacity may be natural or may be induced artificially upon treatment with various factors. In many biological instances, stem cells can also be “multipotent” because they can produce progeny of more than one distinct cell type, but this is not required for “stem-ness.”

[0220] Self-renewal can be another important aspect of the stem cell. In theory, self-renewal can occur by either of two major mechanisms. Stem cells can divide asymmetrically, with one daughter retaining the stem state and the other daughter expressing some distinct other specific function and phenotype. Alternatively, some of the stem cells in a population can divide symmetrically into two stems, thus maintaining some stem cells in the population as a whole, while other cells in the population give rise to differentiated progeny only. Generally, “progenitor cells” have a cellular phenotype that is more primitive (i.e., is at an earlier step along a developmental pathway or progression than is a fully differentiated cell). Often, progenitor cells also have significant or very high proliferative potential. Progenitor cells can give rise to multiple distinct differentiated cell types or to a single differentiated cell type, depending on the developmental pathway and on the environment in which the cells develop and differentiate.

[0221] In the context of cell ontogeny, the adjective “differentiated,” or “differentiating” is a relative term. A “differentiated cell” is a cell that has progressed further down the developmental pathway than the cell to which it is being compared. Thus, stem cells can differentiate into lineage-restricted precursor cells (such as a myocyte progenitor cell), which in turn can differentiate into other types of precursor cells further down the pathway (such as a myocyte precursor), and then to an end-stage differentiated cell, such as a myocyte, which plays a characteristic role in a certain tissue type, and may or may not retain the capacity to proliferate further.

[0222] The term “hematopoietic progenitor cell” refers to cells of a stem cell lineage that give rise to all the blood cell types, including erythroid (erythrocytes or red blood cells (RBCs)), myeloid (monocytes and macrophages, neutrophils, basophils, eosinophils, megakaryocytes/platelets, and dendritic cells), and lymphoid (T-cells, B-cells, NK-cells).

[0223] In some embodiments, the hematopoietic progenitor cell expresses at least one of the following cell surface markers characteristic of hematopoietic progenitor cells: CD34+, CD59+, Thy1/CD90+, CD381o/−, and C-kit/CD1 17+. In some embodiments, the hematopoietic progenitors are CD34+.

[0224] In some embodiments, the hematopoietic progenitor cell is a peripheral blood stem cell obtained from the patient after the patient has been treated with one or more factors such as granulocyte colony stimulating factor (optionally in combination with Plerixaflor). In illustrative embodiments, CD34+ cells are enriched using CliniMACS® Cell Selection System (Miltenyi Biotec). In some embodiments, CD34+ cells are stimulated in serum-free medium (e.g., CellGrow SCGM media, CellGenix) with cytokines (e.g., SCF, rhTPO, rhFLT3) before genome editing. In some embodiments, addition of SRI and dmPGE2 and/or other factors is contemplated to improve long-term engraftment.

[0225] Hematopoietic stem cells (HSCs) are an important target for gene therapy as they provide a prolonged source of the corrected cells. HSCs give rise to both the myeloid and lymphoid lineages of blood cells. Mature blood cells have a finite life-span and must be continuously replaced throughout life. Blood cells are continually produced by the proliferation and differentiation of a population of pluripotent HSCs that can replenished by self-renewal. Bone marrow (BM) is the major site of hematopoiesis in humans and a good source for hematopoietic stem and progenitor cells (HSPCs). HSPCs can be found in small numbers in the peripheral blood (PB). In some indications or treatments their numbers increase. The progeny of HSCs mature through stages, generating multi-potential and lineage-committed progenitor cells including the lymphoid progenitor cells giving rise to the cells expressing WAS. Certain progenitor cells, e.g. B and T cells, could be edited at the stages prior to re-arrangement, though correcting progenitors has the advantage of continuing to be a source of corrected cells. Treated cells, such as CD34+ cells would be returned to the patient. The level of engraftment is important, as is the ability of the cells' multilineage engraftment of gene-edited cells following CD34+ infusion in vivo. In some aspects, the HSCs that can be used are autologous. In other aspects, the HSCs that can be used are allogeneic or non-autologous.

### Induced Pluripotent Stem Cells

[0226] The genetically engineered human cells described herein can be induced pluripotent stem cells (iPSCs). An advantage of using iPSCs is that the cells can be derived from the same subject to which the progenitor cells are to be administered. That is, a somatic cell can be obtained from a subject, reprogrammed to an induced pluripotent stem cell, and then re-differentiated into a progenitor cell to be administered to the subject (e.g., autologous cells). Because the progenitors are essentially derived from an autologous source, the risk of engraftment rejection or allergic response can be reduced compared to the use of cells from another subject or group of subjects. In addition, the use of iPSCs negates the need for cells obtained from an embryonic source. Thus, in one aspect, the stem cells used in the disclosed methods are not embryonic stem cells.

[0227] Although differentiation is generally irreversible under physiological contexts, several methods have been recently developed to reprogram somatic cells to iPSCs. Exemplary methods are known to those of skill in the art and are described briefly herein below.

[0228] The term “reprogramming” refers to a process that alters or reverses the differentiation state of a differentiated cell (e.g., a somatic cell). Stated another way, reprogramming refers to a process of driving the differentiation of a cell backwards to a more undifferentiated or more primitive type of cell. It should be noted that placing many primary cells in culture can lead to some loss of fully differentiated characteristics. Thus, simply culturing such cells included in the term differentiated cells does not render these cells non-differentiated cells (e.g., undifferentiated cells) or pluripotent cells. The transition of a differentiated cell to pluripotency requires a reprogramming stimulus beyond the stimuli that lead to partial loss of differentiated character in culture. Reprogrammed cells also have the characteristic of the capacity of extended passaging without loss of growth potential, relative to primary cell parents, which generally have capacity for only a limited number of divisions in culture.

[0229] The cell to be reprogrammed can be either partially or terminally differentiated prior to reprogramming. Reprogramming can encompass complete reversion of the differentiation state of a differentiated cell (e.g., a somatic cell) to a pluripotent state or a multipotent state. Reprogramming can encompass complete or partial reversion of the differentiation state of a differentiated cell (e.g., a somatic cell) to an undifferentiated cell (e.g., an embryonic-like cell). Reprogramming can result in expression of particular genes by the cells, the expression of which further contributes to reprogramming. In certain examples described herein, reprogramming of a differentiated cell (e.g., a somatic cell) can cause the differentiated cell to assume an undifferentiated state (e.g., is an undifferentiated cell). The resulting cells are referred to as “reprogrammed cells,” or “induced pluripotent stem cells (iPSCs or iPS cells).”

[0230] Reprogramming can involve alteration, e.g., reversal, of at least some of the heritable patterns of nucleic acid modification (e.g., methylation), chromatin condensation, epigenetic changes, genomic imprinting, etc., that occur during cellular differentiation. Reprogramming is distinct from simply maintaining the existing undifferentiated state of a cell that is already pluripotent or maintaining the existing less than fully differentiated state of a cell that is already a multipotent cell (e.g., a myogenic stem cell). Reprogramming is also distinct from promoting the self-renewal or proliferation of cells that are already pluripotent or multipotent, although the compositions and methods described herein can also be of use for such purposes, in some examples.

[0231] Many methods are known in the art that can be used to generate pluripotent stem cells from somatic cells. Any such method that reprograms a somatic cell to the pluripotent phenotype would be appropriate for use in the methods described herein.

[0232] Reprogramming methodologies for generating pluripotent cells using defined combinations of transcription factors have been described. Mouse somatic cells can be converted to ES cell-like cells with expanded developmental potential by the direct transduction of Oct4, Sox2, Klf4, and c-Myc; see, e.g., Takahashi and Yamanaka, Cell 126(4): 663-76 (2006). iPSCs resemble ES cells, as they restore the pluripotency-associated transcriptional circuitry and much of the epigenetic landscape. In addition, mouse iPSCs satisfy all the standard assays for pluripotency: specifically, in vitro differentiation into cell types of the three germ layers, teratoma formation, contribution to chimeras, germline transmission [see, e.g., Maherali and Hochedlinger. Cell Stem Cell. 3(6):595-605 (2008)], and tetraploid complementation.

[0233] Human iPSCs can be obtained using similar transduction methods, and the transcription factor trio, OCT4, SOX2, and NANOG, has been established as the core set of transcription factors that govern pluripotency; see, e.g., Budniatzky and Gepstein, Stem Cells Transl Med. 3(4):448-57 (2014); Barrett et al., Stem Cells Trans Med 3:1-6 sctm.2014-0121 (2014); Focosi et al., Blood Cancer Journal 4; e211 (2014); and references cited therein. The production of iPSCs can be achieved by the introduction of nucleic acid sequences encoding stem cell-associated genes into an adult, somatic cell, historically using viral vectors.

[0234] iPSCs can be generated or derived from terminally differentiated somatic cells, as well as from adult stem cells, or somatic stem cells. That is, a non-pluripotent progenitor cell can be rendered pluripotent or multipotent by reprogramming. In such instances, it may not be necessary to include as many reprogramming factors as required to reprogram a terminally differentiated cell. Further, reprogramming can be induced by the non-viral introduction of reprogramming factors, e.g., by introducing the proteins themselves, or by introducing nucleic acids that encode the reprogramming factors, or by introducing messenger RNAs that upon translation produce the reprogramming factors (see e.g., Warren et al., Cell Stem Cell, 7(5):618-30 (2010). Reprogramming can be achieved by introducing a combination of nucleic acids encoding stem cell-associated genes, including, for example, Oct-4 (also known as Oct-3/4 or Pouf51), Sox1, Sox2, Sox3, Sox 15, Sox 18, NANOG, Klf1, Klf2, Klf4, Klf5, NR5A2, c-Myc, 1-Myc, n-Myc, Rem2, Tert, and LIN28. Reprogramming using the methods and compositions described herein can further have introducing one or more of Oct-3/4, a member of the Sox family, a member of the Klf family, and a member of the Myc family to a somatic cell. The methods and compositions described herein can further have introducing one or more of each of Oct-4, Sox2, Nanog, c-MYC and Klf4 for reprogramming. As noted above, the exact method used for reprogramming is not necessarily critical to the methods and compositions described herein. However, where cells differentiated from the reprogrammed cells are to be used in, e.g., human therapy, in one aspect the reprogramming is not effected by a method that alters the genome. Thus, in such examples, reprogramming can be achieved, e.g., without the use of viral or plasmid vectors.

[0235] The efficiency of reprogramming (i.e., the number of reprogrammed cells) derived from a population of starting cells can be enhanced by the addition of various agents, e.g., small molecules, as shown by Shi et al., Cell-Stem Cell 2:525-528 (2008); Huangfu et al., Nature Biotechnology 26(7):795-797 (2008) and Marson et al., Cell-Stem Cell 3: 132-135 (2008). Thus, an agent or combination of agents that enhance the efficiency or rate of induced pluripotent stem cell production can be used in the production of patient-specific or disease-specific iPSCs. Some non-limiting examples of agents that enhance reprogramming efficiency include soluble Wnt, Wnt conditioned media, BIX-01294 (a G9a histone methyltransferase), PD0325901 (a MEK inhibitor), DNA methyltransferase inhibitors, histone deacetlase (HDAC) inhibitors, valproic acid, 5′-azacytidine, dexamethasone, suberoylanilide, hydroxamic acid (SAHA), vitamin C, and trichostatin (TSA), among others.

[0236] Other non-limiting examples of reprogramming enhancing agents include: Suberoylanilide Hydroxamic Acid (SAHA (e.g., MK0683, vorinostat) and other hydroxamic acids), BML-210, Depudecin (e.g., (−)-Depudecin), HC Toxin, Nullscript (4-(1,3-Dioxo-1H,3H-benzo[de]isoquinolin-2-yl)-N-hydroxybutanamide). Phenylbutyrate (e.g., sodium phenylbutyrate) and Valproic Acid ((VP A) and other short chain fatty acids). Scriptaid, Suramin Sodium, Trichostatin A (TSA), APHA Compound 8, Apicidin, Sodium Butyrate, pivaloyloxymethyl butyrate (Pivanex, AN-9), Trapoxin B, Chlamydocin, Depsipeptide (also known as FR901228 or FK228), benzamides (e.g., CI-994 (e.g., N-acetyl dinaline) and MS-27-275), MGCD0103, NVP-LAQ-824, CBHA (m-carboxycinnaminic acid bishydroxamic acid), JNJ16241199, Tubacin, A-161906, proxamide, oxamflatin, 3-Cl-UCHA (e.g., 6-(3-chlorophenylureido)caproic hydroxamic acid), AOE (2-amino-8-oxo-9, 10-epoxydecanoic acid), CHAP31 and CHAP 50. Other reprogramming enhancing agents include, for example, dominant negative forms of the HDACs (e.g., catalytically inactive forms), siRNA inhibitors of the HDACs, and antibodies that specifically bind to the HDACs. Such inhibitors are available, e.g., from BIOMOL International, Fukasawa, Merck Biosciences. Novartis, Gloucester Pharmaceuticals, Titan Pharmaceuticals, MethylGene, and Sigma Aldrich.

[0237] To confirm the induction of pluripotent stem cells for use with the methods described herein, isolated clones can be tested for the expression of a stem cell marker. Such expression in a cell derived from a somatic cell identifies the cells as induced pluripotent stem cells. Stem cell markers can be selected from the non-limiting group including SSEA3, SSEA4, CD9, Nanog, Fbx15, Ecat1, Esg1, Eras, Gdf3, Fgf4, Cripto, Dax1, Zpf296, Slc2a3, Rex1, Utfl, and Natl. In one case, for example, a cell that expresses Oct4 or Nanog is identified as pluripotent. Methods for detecting the expression of such markers can include, for example, RT-PCR and immunological methods that detect the presence of the encoded polypeptides, such as Western blots or flow cytometric analyses. Detection can involve not only RT-PCR, but can also include detection of protein markers. Intracellular markers may be best identified via RT-PCR, or protein detection methods such as immunocytochemistry, while cell surface markers are readily identified, e.g., by immunocytochemistry.

[0238] The pluripotent stem cell character of isolated cells can be confirmed by tests evaluating the ability of the iPSCs to differentiate into cells of each of the three germ layers. As one example, teratoma formation in nude mice can be used to evaluate the pluripotent character of the isolated clones. The cells can be introduced into nude mice and histology and/or immunohistochemistry can be performed on a tumor arising from the cells. The growth of a tumor having cells from all three germ layers, for example, further indicates that the cells are pluripotent stem cells.

### Hepatocytes

[0239] In some embodiments, the genetically engineered human cells described herein are hepatocytes. A hepatocyte is a cell of the main parenchymal tissue of the liver. Hepatocytes make up 70-85% of the liver's mass. These cells are involved in: protein synthesis; protein storage; transformation of carbohydrates; synthesis of cholesterol, bile salts and phospholipids; detoxification, modification, and excretion of exogenous and endogenous substances; and initiation of formation and secretion of bile.

Creating Patient Specific iPSCs

[0240] One step of the ex vivo methods of the present disclosure can involve creating a patient specific iPS cell, patient specific iPS cells, or a patient specific iPS cell line. There are many established methods in the art for creating patient specific iPS cells, as described in Takahashi and Yamanaka 2006; Takahashi, Tanabe et al. 2007. For example, the creating step can have: a) isolating a somatic cell, such as a skin cell or fibroblast, from the patient; and b) introducing a set of pluripotency-associated genes into the somatic cell in order to induce the cell to become a pluripotent stem cell. The set of pluripotency-associated genes can be one or more of the genes selected from the group consisting of OCT4, SOX1, SOX2, SOX3, SOX15, SOX18, NANOG, KLF1, KLF2, KLF4, KLF5, c-MYC, n-MYC, REM2, TERT and LIN28.

### Performing a Biopsy or Aspirate of the Patient's Liver or Bone Marrow

[0241] A biopsy or aspirate is a sample of tissue or fluid taken from the body. There are many different kinds of biopsies or aspirates. Nearly all of them involve using a sharp tool to remove a small amount of tissue. If the biopsy will be on the skin or other sensitive area, numbing medicine can be applied first. A biopsy or aspirate may be performed according to any of the known methods in the art. For example, in a biopsy, a needle is injected into the liver through the skin of the belly, capturing the liver tissue. For example, in a bone marrow aspirate, a large needle is used to enter the pelvis bone to collect bone marrow.

### Isolating a Liver Specific Progenitor Cell or Primary Hepatocyte

[0242] Liver specific progenitor cells and primary hepatocytes may be isolated according to any method known in the art. For example, human hepatocytes are isolated from fresh surgical specimens. Healthy liver tissue is used to isolate hepatocytes by collagenase digestion. The obtained cell suspension is filtered through a 100-mm nylon mesh and sedimented by centrifugation at 50 g for 5 minutes, resuspended, and washed two to three times in cold wash medium. Human liver stem cells are obtained by culturing under stringent conditions of hepatocytes obtained from fresh liver preparations. Hepatocytes seeded on collagen-coated plates are cultured for 2 weeks. After 2 weeks, surviving cells are removed, and characterized for expression of stem cells markers (Herrera et al., STEM CELLS 2006; 24: 2840-2850).

### Isolating a White Blood Cell

[0243] White blood cells may be isolated according to any method known in the art. For example, white blood cells can be isolated from a liquid sample by centrifugation and cell culturing. In some cases, white blood cells can be isolated from a whole blood sample by centrifugation through Ficoll.

### Isolating a Mesenchymal Stem Cell

[0244] Mesenchymal stem cells can be isolated according to any method known in the art, such as from a patient's bone marrow or peripheral blood. For example, marrow aspirate can be collected into a syringe with heparin. Cells can be washed and centrifuged on a Percoll. The cells can be cultured in Dulbecco's modified Eagle's medium (DMEM) (low glucose) containing 10% fetal bovine serum (FBS) (Pittinger M F, Mackay A M, Beck S C et al., Science 1999; 284:143-147).

Isolating a Hematopoietic Progenitor Cell from a Patient

[0245] A hematopoietic progenitor cell may be isolated from a patient by any method known in the art. CD34+ cells are enriched using CliniMACS® Cell Selection System (Miltenyi Biotec). In some embodiments, CD34+ cells are stimulated in serum-free medium (e.g., CellGrow SCGM media, CellGenix) with cytokines (e.g., SCF, rhTPO, rhFLT3) before genome editing.

### Site-Directed Polypeptides (Endonucleases, Enzymes)

[0246] A site-directed polypeptide is a nuclease used in genome editing to cleave DNA. The site-directed nuclease can be administered to a cell or a patient as either: one or more polypeptides, or one or more mRNAs encoding the polypeptide. Any of the enzymes or orthologs listed in Tables 1 or 2 or disclosed herein may be utilized in the methods herein.

[0247] In the context of a CRISPR/Cas or CRISPR/Cpf1 system, the site-directed polypeptide can bind to a guide RNA that, in turn, specifies the site in the target DNA to which the polypeptide is directed. In the CRISPR/Cas or CRISPR/Cpf1 systems disclosed herein, the site-directed polypeptide can be an endonuclease, such as a DNA endonuclease.

[0248] A site-directed polypeptide can have a plurality of nucleic acid-cleaving (i.e., nuclease) domains. Two or more nucleic acid-cleaving domains can be linked together via a linker. For example, the linker can have a flexible linker. Linkers can have 1, 2, 3, 4, 5, 6, 7, 8, 9, 10, 11, 12, 13, 14, 15, 16, 17, 18, 19, 20, 21, 22, 23, 24, 25, 30, 35, 40 or more amino acids in length.

[0249] Naturally-occurring wild-type Cas9 enzymes have two nuclease domains, a HNH nuclease domain and a RuvC domain. Herein, the “Cas9” refers to both naturally-occurring and recombinant Cas9s. Cas9 enzymes contemplated herein can have a HNH or HNH-like nuclease domain, and/or a RuvC or RuvC-like nuclease domain.

[0250] HNH or HNH-like domains have a McrA-like fold. HNH or HNH-like domains has two antiparallel β-strands and an α-helix. HNH or HNH-like domains has a metal binding site (e.g, a divalent cation binding site). HNH or HNH-like domains can cleave one strand of a target nucleic acid (e.g., the complementary strand of the crRNA targeted strand).

[0251] RuvC or RuvC-like domains have an RNaseH or RNaseH-like fold. RuvC/RNaseH domains are involved in a diverse set of nucleic acid-based functions including acting on both RNA and DNA. The RNaseH domain has 5 β-strands surrounded by a plurality of α-helices. RuvC/RNaseH or RuvC/RNaseH-like domains have a metal binding site (e.g., a divalent cation binding site). RuvC/RNaseH or RuvC/RNaseH-like domains can cleave one strand of a target nucleic acid (e.g., the non-complementary strand of a double-stranded target DNA).

[0252] Site-directed polypeptides can introduce double-strand breaks or single-strand breaks in nucleic acids, e.g., genomic DNA. The double-strand break can stimulate a cell's endogenous DNA-repair pathways (e.g., homology-dependent repair (HDR) or NHEJ or alternative non-homologous end joining (A-NHEJ) or microhomology-mediated end joining (MMEJ)). NHEJ can repair cleaved target nucleic acid without the need for a homologous template. This can sometimes result in small deletions or insertions (InDels) in the target nucleic acid at the site of cleavage, and can lead to disruption or alteration of gene expression. HDR can occur when a homologous repair template, or donor, is available. The homologous donor template can have sequences that are homologous to sequences flanking the target nucleic acid cleavage site. The sister chromatid can be used by the cell as the repair template. However, for the purposes of genome editing, the repair template can be supplied as an exogenous nucleic acid, such as a plasmid, duplex oligonucleotide, single-strand oligonucleotide or viral nucleic acid. With exogenous donor templates, an additional nucleic acid sequence (such as a transgene) or modification (such as a single or multiple base change or a deletion) can be introduced between the flanking regions of homology so that the additional or altered nucleic acid sequence also becomes incorporated into the target locus. MMEJ can result in a genetic outcome that is similar to NHEJ in that small deletions and insertions can occur at the cleavage site. MMEJ can make use of homologous sequences of a few base pairs flanking the cleavage site to drive a favored end-joining DNA repair outcome. In some instances, it may be possible to predict likely repair outcomes based on analysis of potential microhomologies in the nuclease target regions.

[0253] Thus, in some cases, homologous recombination can be used to insert an exogenous polynucleotide sequence into the target nucleic acid cleavage site. An exogenous polynucleotide sequence is termed a donor polynucleotide (or donor or donor sequence) herein. The donor polynucleotide, a portion of the donor polynucleotide, a copy of the donor polynucleotide, or a portion of a copy of the donor polynucleotide can be inserted into the target nucleic acid cleavage site. The donor polynucleotide can be an exogenous polynucleotide sequence, i.e., a sequence that does not naturally occur at the target nucleic acid cleavage site.

[0254] The modifications of the target DNA due to NHEJ and/or HDR can lead to, for example, mutations, deletions, alterations, integrations, gene correction, gene replacement, gene tagging, transgene insertion, nucleotide deletion, gene disruption, translocations and/or gene mutation. The processes of deleting genomic DNA and integrating non-native nucleic acid into genomic DNA are examples of genome editing.

[0255] The site-directed polypeptide can have an amino acid sequence having at least 10%, at least 15%, at least 20%, at least 30%, at least 40%, at least 50%, at least 60%, at least 70%, at least 75%, at least 80%, at least 85%, at least 90%, at least 95%, at least 99%, or 100% amino acid sequence identity to a wild-type exemplary site-directed polypeptide [e.g., Cas9 from S. pyogenes, US2014/0068797 Sequence ID No. 8 or Sapranauskas et al., Nucleic Acid Res, 39(21): 9275-9282 (2011)], and various other site-directed polypeptides. The site-directed polypeptide can have at least 70, 75, 80, 85, 90, 95, 97, 99, or 100% identity to a wild-type site-directed polypeptide (e.g., Cas9 from S. pyogenes, supra) over 10 contiguous amino acids. The site-directed polypeptide can have at most: 70, 75, 80, 85, 90, 95, 97, 99, or 100% identity to a wild-type site-directed polypeptide (e.g., Cas9 from S. pyogenes, supra) over 10 contiguous amino acids. The site-directed polypeptide can have at least: 70, 75, 80, 85, 90, 95, 97, 99, or 100% identity to a wild-type site-directed polypeptide (e.g., Cas9 from S. pyogenes, supra) over 10 contiguous amino acids in a HNH nuclease domain of the site-directed polypeptide. The site-directed polypeptide can have at most: 70, 75, 80, 85, 90, 95, 97, 99, or 100% identity to a wild-type site-directed polypeptide (e.g., Cas9 from S. pyogenes, supra) over 10 contiguous amino acids in a HNH nuclease domain of the site-directed polypeptide. The site-directed polypeptide can have at least: 70, 75, 80, 85, 90, 95, 97, 99, or 100% identity to a wild-type site-directed polypeptide (e.g., Cas9 from S. pyogenes, supra) over 10 contiguous amino acids in a RuvC nuclease domain of the site-directed polypeptide. The site-directed polypeptide can have at most: 70, 75, 80, 85, 90, 95, 97, 99, or 100% identity to a wild-type site-directed polypeptide (e.g., Cas9 from S. pyogenes, supra) over 10 contiguous amino acids in a RuvC nuclease domain of the site-directed polypeptide.

[0256] The site-directed polypeptide can have a modified form of a wild-type exemplary site-directed polypeptide. The modified form of the wild-type exemplary site-directed polypeptide can have a mutation that reduces the nucleic acid-cleaving activity of the site-directed polypeptide. The modified form of the wild-type exemplary site-directed polypeptide can have less than 90%, less than 80%, less than 70%, less than 60%, less than 50%, less than 40%, less than 30%, less than 20%, less than 10%, less than 5%, or less than 1% of the nucleic acid-cleaving activity of the wild-type exemplary site-directed polypeptide (e.g., Cas9 from S. pyogenes, supra). The modified form of the site-directed polypeptide can have no substantial nucleic acid-cleaving activity. When a site-directed polypeptide is a modified form that has no substantial nucleic acid-cleaving activity, it is referred to herein as “enzymatically inactive.”

[0257] The modified form of the site-directed polypeptide can have a mutation such that it can induce a single-strand break (SSB) on a target nucleic acid (e.g., by cutting only one of the sugar-phosphate backbones of a double-strand target nucleic acid). The mutation can result in less than 90%, less than 80%, less than 70%, less than 60%, less than 50%, less than 40%, less than 30%, less than 20%, less than 10%, less than 5%, or less than 1% of the nucleic acid-cleaving activity in one or more of the plurality of nucleic acid-cleaving domains of the wild-type site directed polypeptide (e.g., Cas9 from S. pyogenes, supra). The mutation can result in one or more of the plurality of nucleic acid-cleaving domains retaining the ability to cleave the complementary strand of the target nucleic acid, but reducing its ability to cleave the non-complementary strand of the target nucleic acid. The mutation can result in one or more of the plurality of nucleic acid-cleaving domains retaining the ability to cleave the non-complementary strand of the target nucleic acid, but reducing its ability to cleave the complementary strand of the target nucleic acid. For example, residues in the wild-type exemplary S. pyogenes Cas9 polypeptide, such as Asp 10, His840, Asn854 and Asn856, are mutated to inactivate one or more of the plurality of nucleic acid-cleaving domains (e.g., nuclease domains). The residues to be mutated can correspond to residues Asp10, His840, Asn854 and Asn856 in the wild-type exemplary S. pyogenes Cas9 polypeptide (e.g., as determined by sequence and/or structural alignment). Non-limiting examples of mutations include D10A, H840A, N854A or N856A. One skilled in the art will recognize that mutations other than alanine substitutions can be suitable.

[0258] A D10A mutation can be combined with one or more of H840A, N854A, or N856A mutations to produce a site-directed polypeptide substantially lacking DNA cleavage activity. A H840A mutation can be combined with one or more of D10A, N854A, or N856A mutations to produce a site-directed polypeptide substantially lacking DNA cleavage activity. A N854A mutation can be combined with one or more of H840A, D10A, or N856A mutations to produce a site-directed polypeptide substantially lacking DNA cleavage activity. A N856A mutation can be combined with one or more of H840A. N854A, or D 10A mutations to produce a site-directed polypeptide substantially lacking DNA cleavage activity. Site-directed polypeptides that have one substantially inactive nuclease domain are referred to as “nickases”.

[0259] Nickase variants of RNA-guided endonucleases, for example Cas9, can be used to increase the specificity of CRISPR-mediated genome editing. Wild type Cas9 is typically guided by a single guide RNA designed to hybridize with a specified ˜20 nucleotide sequence in the target sequence (such as an endogenous genomic locus). However, several mismatches can be tolerated between the guide RNA and the target locus, effectively reducing the length of required homology in the target site to, for example, as little as 13 nt of homology, and thereby resulting in elevated potential for binding and double-strand nucleic acid cleavage by the CRISPR/Cas9 complex elsewhere in the target genome—also known as off-target cleavage. Because nickase variants of Cas9 each only cut one strand, in order to create a double-strand break it is necessary for a pair of nickases to bind in close proximity and on opposite strands of the target nucleic acid, thereby creating a pair of nicks, which is the equivalent of a double-strand break. This requires that two separate guide RNAs—one for each nickase—must bind in close proximity and on opposite strands of the target nucleic acid. This requirement essentially doubles the minimum length of homology needed for the double-strand break to occur, thereby reducing the likelihood that a double-strand cleavage event will occur elsewhere in the genome, where the two guide RNA sites—if they exist—are unlikely to be sufficiently close to each other to enable the double-strand break to form. As described in the art, nickases can also be used to promote HDR versus NHEJ. HDR can be used to introduce selected changes into target sites in the genome through the use of specific donor sequences that effectively mediate the desired changes.

[0260] Mutations contemplated can include substitutions, additions, and deletions, or any combination thereof. The mutation converts the mutated amino acid to alanine. The mutation converts the mutated amino acid to another amino acid (e.g., glycine, serine, threonine, cysteine, valine, leucine, isoleucine, methionine, proline, phenylalanine, tyrosine, tryptophan, aspartic acid, glutamic acid, asparagine, glutamine, histidine, lysine, or arginine). The mutation converts the mutated amino acid to a non-natural amino acid (e.g., selenomethionine). The mutation converts the mutated amino acid to amino acid mimics (e.g., phosphomimics). The mutation can be a conservative mutation. For example, the mutation converts the mutated amino acid to amino acids that resemble the size, shape, charge, polarity, conformation, and/or rotamers of the mutated amino acids (e.g., cysteine/serine mutation, lysine/asparagine mutation, histidine/phenylalanine mutation). The mutation can cause a shift in reading frame and/or the creation of a premature stop codon. Mutations can cause changes to regulatory regions of genes or loci that affect expression of one or more genes.

[0261] The site-directed polypeptide (e.g., variant, mutated, enzymatically inactive and/or conditionally enzymatically inactive site-directed polypeptide) can target nucleic acid. The site-directed polypeptide (e.g., variant, mutated, enzymatically inactive and/or conditionally enzymatically inactive endoribonuclease) can target DNA. The site-directed polypeptide (e.g., variant, mutated, enzymatically inactive and/or conditionally enzymatically inactive endoribonuclease) can target RNA.

[0262] The site-directed polypeptide can have one or more non-native sequences (e.g., the site-directed polypeptide is a fusion protein).

[0263] The site-directed polypeptide can have an amino acid sequence having at least 15% amino acid identity to a Cas9 from a bacterium (e.g., S. pyogenes), a nucleic acid binding domain, and two nucleic acid cleaving domains (i.e., a HNH domain and a RuvC domain).

[0264] The site-directed polypeptide can have an amino acid sequence having at least 15% amino acid identity to a Cas9 from a bacterium (e.g., S. pyogenes), and two nucleic acid cleaving domains (i.e., a HNH domain and a RuvC domain).

[0265] The site-directed polypeptide can have an amino acid sequence having at least 15% amino acid identity to a Cas9 from a bacterium (e.g., S. pyogenes), and two nucleic acid cleaving domains, wherein one or both of the nucleic acid cleaving domains have at least 50% amino acid identity to a nuclease domain from Cas9 from a bacterium (e.g., S. pyogenes).

[0266] The site-directed polypeptide can have an amino acid sequence having at least 15% amino acid identity to a Cas9 from a bacterium (e.g., S. pyogenes), two nucleic acid cleaving domains (i.e., a HNH domain and a RuvC domain), and non-native sequence (for example, a nuclear localization signal) or a linker linking the site-directed polypeptide to a non-native sequence.

[0267] The site-directed polypeptide can have an amino acid sequence having at least 15% amino acid identity to a Cas9 from a bacterium (e.g., S. pyogenes), two nucleic acid cleaving domains (i.e., a HNH domain and a RuvC domain), wherein the site-directed polypeptide has a mutation in one or both of the nucleic acid cleaving domains that reduces the cleaving activity of the nuclease domains by at least 50%.

[0268] The site-directed polypeptide can have an amino acid sequence having at least 15% amino acid identity to a Cas9 from a bacterium (e.g., S. pyogenes), and two nucleic acid cleaving domains (i.e., a HNH domain and a RuvC domain), wherein one of the nuclease domains has mutation of aspartic acid 10, and/or wherein one of the nuclease domains can have a mutation of histidine 840, and wherein the mutation reduces the cleaving activity of the nuclease domain(s) by at least 50%.

[0269] The one or more site-directed polypeptides, e.g. DNA endonucleases, can have two nickases that together effect one double-strand break at a specific locus in the genome, or four nickases that together effect or cause two double-strand breaks at specific loci in the genome. Alternatively, one site-directed polypeptide, e.g. DNA endonuclease, can effect or cause one double-strand break at a specific locus in the genome.

### Genome-Targeting Nucleic Acid

[0270] The present disclosure provides a genome-targeting nucleic acid that can direct the activities of an associated polypeptide (e.g., a site-directed polypeptide) to a specific target sequence within a target nucleic acid. The genome-targeting nucleic acid can be an RNA. A genome-targeting RNA is referred to as a “guide RNA” or “gRNA” herein. A guide RNA can have at least a spacer sequence that hybridizes to a target nucleic acid sequence of interest, and a CRISPR repeat sequence. In Type II systems, the gRNA also has a second RNA called the tracrRNA sequence. In the Type II guide RNA (gRNA), the CRISPR repeat sequence and tracrRNA sequence hybridize to each other to form a duplex. In the Type V guide RNA (gRNA), the crRNA forms a duplex. In both systems, the duplex can bind a site-directed polypeptide, such that the guide RNA and site-direct polypeptide form a complex. The genome-targeting nucleic acid can provide target specificity to the complex by virtue of its association with the site-directed polypeptide. The genome-targeting nucleic acid thus can direct the activity of the site-directed polypeptide.

[0271] Exemplary guide RNAs include the spacer sequences 15-200 bases wherein the genome location is based on the GRCh38 human genome assembly. As is understood by the person of ordinary skill in the art, each guide RNA can be designed to include a spacer sequence complementary to its genomic target sequence. For example, each of the spacer sequences can be put into a single RNA chimera or a crRNA (along with a corresponding tracrRNA). See Jinek et al., Science, 337, 816-821 (2012) and Deltcheva et al., Nature, 471, 602-607 (2011).

[0272] The genome-targeting nucleic acid can be a double-molecule guide RNA. The genome-targeting nucleic acid can be a single-molecule guide RNA.

[0273] A double-molecule guide RNA can have two strands of RNA. The first strand has in the 5′ to 3′ direction, an optional spacer extension sequence, a spacer sequence and a minimum CRISPR repeat sequence. The second strand can have a minimum tracrRNA sequence (complementary to the minimum CRISPR repeat sequence), a 3′ tracrRNA sequence and an optional tracrRNA extension sequence.

[0274] A single-molecule guide RNA (sgRNA) in a Type II system can have, in the 5′ to 3′ direction, an optional spacer extension sequence, a spacer sequence, a minimum CRISPR repeat sequence, a single-molecule guide linker, a minimum tracrRNA sequence, a 3′ tracrRNA sequence and an optional tracrRNA extension sequence. The optional tracrRNA extension can have elements that contribute additional functionality (e.g., stability) to the guide RNA. The single-molecule guide linker can link the minimum CRISPR repeat and the minimum tracrRNA sequence to form a hairpin structure. The optional tracrRNA extension can have one or more hairpins.

[0275] A single-molecule guide RNA (sgRNA) in a Type V system can have, in the 5′ to 3′ direction, a minimum CRISPR repeat sequence and a spacer sequence.

[0276] By way of illustration, guide RNAs used in the CRISPR/Cas/Cpf1 system, or other smaller RNAs can be readily synthesized by chemical means, as illustrated below and described in the art. While chemical synthetic procedures are continually expanding, purifications of such RNAs by procedures such as high performance liquid chromatography (HPLC, which avoids the use of gels such as PAGE) tends to become more challenging as polynucleotide lengths increase significantly beyond a hundred or so nucleotides. One approach used for generating RNAs of greater length is to produce two or more molecules that are ligated together. Much longer RNAs, such as those encoding a Cas9 or Cpf1 endonuclease, are more readily generated enzymatically. Various types of RNA modifications can be introduced during or after chemical synthesis and/or enzymatic generation of RNAs, e.g., modifications that enhance stability, reduce the likelihood or degree of innate immune response, and/or enhance other attributes, as described in the art.

### Spacer Extension Sequence

[0277] In some examples of genome-targeting nucleic acids, a spacer extension sequence can modify activity, provide stability and/or provide a location for modifications of a genome-targeting nucleic acid. A spacer extension sequence can modify on- or off-target activity or specificity. In some examples, a spacer extension sequence can be provided. The spacer extension sequence can have a length of more than 1, 5, 10, 15, 20, 25, 30, 35, 40, 45, 50, 60, 70, 80, 90, 100, 120, 140, 160, 180, 200, 220, 240, 260, 280, 300, 320, 340, 360, 380, 400, 1000, 2000, 3000, 4000, 5000, 6000, or 7000 or more nucleotides. The spacer extension sequence can have a length of less than 1, 5, 10, 15, 20, 25, 30, 35, 40, 45, 50, 60, 70, 80, 90, 100, 120, 140, 160, 180, 200, 220, 240, 260, 280, 300, 320, 340, 360, 380, 400, 1000, 2000, 3000, 4000, 5000, 6000, 7000 or more nucleotides. The spacer extension sequence can be less than 10 nucleotides in length. The spacer extension sequence can be between 10-30 nucleotides in length. The spacer extension sequence can be between 30-70 nucleotides in length.

[0278] The spacer extension sequence can have another moiety (e.g., a stability control sequence, an endoribonuclease binding sequence, a ribozyme). The moiety can decrease or increase the stability of a nucleic acid targeting nucleic acid. The moiety can be a transcriptional terminator segment (i.e., a transcription termination sequence). The moiety can function in a eukaryotic cell. The moiety can function in a prokaryotic cell. The moiety can function in both eukaryotic and prokaryotic cells. Non-limiting examples of suitable moieties include: a 5′ cap (e.g., a 7-methylguanylate cap (m7 G)), a riboswitch sequence (e.g., to allow for regulated stability and/or regulated accessibility by proteins and protein complexes), a sequence that forms a dsRNA duplex (i.e., a hairpin), a sequence that targets the RNA to a subcellular location (e.g., nucleus, mitochondria, chloroplasts, and the like), a modification or sequence that provides for tracking (e.g., direct conjugation to a fluorescent molecule, conjugation to a moiety that facilitates fluorescent detection, a sequence that allows for fluorescent detection, etc.), and/or a modification or sequence that provides a binding site for proteins (e.g., proteins that act on DNA, including transcriptional activators, transcriptional repressors, DNA methyltransferases, DNA demethylases, histone acetyltransferases, histone deacetylases, and the like).

### Spacer Sequence

[0279] The spacer sequence hybridizes to a sequence in a target nucleic acid of interest. The spacer of a genome-targeting nucleic acid can interact with a target nucleic acid in a sequence-specific manner via hybridization (i.e., base pairing). The nucleotide sequence of the spacer can vary depending on the sequence of the target nucleic acid of interest.

[0280] In a CRISPR/Cas system herein, the spacer sequence can be designed to hybridize to a target nucleic acid that is located 5′ of a PAM of the Cas9 enzyme used in the system. The spacer may perfectly match the target sequence or may have mismatches. Each Cas9 enzyme has a particular PAM sequence that it recognizes in a target DNA. For example, S. pyogenes recognizes in a target nucleic acid a PAM that has the sequence 5′-NRG-3′, where R has either A or G, where N is any nucleotide and N is immediately 3′ of the target nucleic acid sequence targeted by the spacer sequence.

[0281] The target nucleic acid sequence can have 20 nucleotides. The target nucleic acid can have less than 20 nucleotides. The target nucleic acid can have more than 20 nucleotides. The target nucleic acid can have at least: 5, 10, 15, 16, 17, 18, 19, 20, 21, 22, 23, 24, 25, 30 or more nucleotides. The target nucleic acid can have at most: 5, 10, 15, 16, 17, 18, 19, 20, 21, 22, 23, 24, 25, 30 or more nucleotides. The target nucleic acid sequence can have 20 bases immediately 5′ of the first nucleotide of the PAM.

[0282] The spacer sequence that hybridizes to the target nucleic acid can have a length of at least about 6 nucleotides (nt). The spacer sequence can be at least about 6 nt, at least about 10 nt, at least about 15 nt, at least about 18 nt, at least about 19 nt, at least about 20 nt, at least about 25 nt, at least about 30 nt, at least about 35 nt or at least about 40 nt, from about 6 nt to about 80 nt, from about 6 nt to about 50 nt, from about 6 nt to about 45 nt, from about 6 nt to about 40 nt, from about 6 nt to about 35 nt, from about 6 nt to about 30 nt, from about 6 nt to about 25 nt, from about 6 nt to about 20 nt, from about 6 nt to about 19 nt, from about 10 nt to about 50 nt, from about 10 nt to about 45 nt, from about 10 nt to about 40 nt, from about 10 nt to about 35 nt, from about 10 nt to about 30 nt, from about 10 nt to about 25 nt, from about 10 nt to about 20 nt, from about 10 nt to about 19 nt, from about 19 nt to about 25 nt, from about 19 nt to about 30 nt, from about 19 nt to about 35 nt, from about 19 nt to about 40 nt, from about 19 nt to about 45 nt, from about 19 nt to about 50 nt, from about 19 nt to about 60 nt, from about 20 nt to about 25 nt, from about 20 nt to about 30 nt, from about 20 nt to about 35 nt, from about 20 nt to about 40 nt, from about 20 nt to about 45 nt, from about 20 nt to about 50 nt, or from about 20 nt to about 60 nt. In some examples, the spacer sequence can have 20 nucleotides. In some examples, the spacer can have 19 nucleotides.

[0283] In some examples, the percent complementarity between the spacer sequence and the target nucleic acid is at least about 30%, at least about 40%, at least about 50%, at least about 60%, at least about 65%, at least about 70%, at least about 75%, at least about 80%, at least about 85%, at least about 90%, at least about 95%, at least about 97%, at least about 98%, at least about 99%, or 100%. In some examples, the percent complementarity between the spacer sequence and the target nucleic acid is at most about 30%, at most about 40%, at most about 50%, at most about 60%, at most about 65%, at most about 70%, at most about 75%, at most about 80%, at most about 85%, at most about 90%, at most about 95%, at most about 97%, at most about 98%, at most about 99%, or 100%. In some examples, the percent complementarity between the spacer sequence and the target nucleic acid is 100% over the six contiguous 5′-most nucleotides of the target sequence of the complementary strand of the target nucleic acid. The percent complementarity between the spacer sequence and the target nucleic acid can be at least 60% over about 20 contiguous nucleotides. The length of the spacer sequence and the target nucleic acid can differ by 1 to 6 nucleotides, which may be thought of as a bulge or bulges.

[0284] The spacer sequence can be designed or chosen using a computer program. The computer program can use variables, such as predicted melting temperature, secondary structure formation, predicted annealing temperature, sequence identity, genomic context, chromatin accessibility, % GC, frequency of genomic occurrence (e.g., of sequences that are identical or are similar but vary in one or more spots as a result of mismatch, insertion or deletion), methylation status, presence of SNPs, and the like.

[0285] Table 4 provides some of non-limiting and illustrative examples of spacer sequences that can be used in certain embodiments of the disclosure. The efficiency indicated in Table 4 represents a frequency of cut at the target site in the genome when each gRNA is introduced with DNA endonuclease. For example, if one gRNA is introduced to a cell with DNA endonuclease and it cuts the genome at the intended target site every time of delivery, the efficiency will be scored as 100%. Therefore, the higher the efficiency value is the more efficient and accurate the cutting by the gRNA is at the target site. The sequences from Table 4 are designed to target sites at, at, within, or near the WAS gene locus. In particular, the sequences targeted by the gRNAs from Table 4 are in the intergenic sequence that is upstream of the promoter of the endogenous WAS promoter. In some embodiments, the intergenic sequence may be at least 500 bp or about 500 bp upstream of the first exon of the endogenous WAS gene. In some embodiments, the intergenic sequence may be at least 500 bp or about 500 bp to about 2000 bp upstream of the first exon of the endogenous WAS gene. In some embodiments, the spacer sequence can be any sequences from Table 4 or any variants thereof having at least 30%, at least 40%, at least 50%, at least 60%, at least 70%, at least 80%, at least 85%, at least 90%, at least 95%, at least 96%, at least 97%, at least 98%, at least 99% or about 100% identity to the sequences from Table 4. In some embodiments, the spacer sequence can be 15 bases to 20 bases in length.

TABLE 4
Examplary gRNA Sequences

| | | | Efficiency | |
|---|---|---|---|---|
| Name | Guide (or spacer) | PAM | (%) | SEQ ID NO. |
| WASp_T91 | GCCAAGAGTGAAGGCGTGGA | GGG | 91.8 | 5267 |
| WASp_T140 | AAAGTAATTTGGGAGCTGCG | GGG | 87.3 | 5268 |
| WASp_T245 | GGGGTGTGACTGACATTCCC | AGG | 87.2 | 5269 |
| WASp_T18 | GGCCAGTAGTGCTTACTTTG | TGG | 87 | 5270 |
| WASp_T26 | AACACGTGCAATGGCCTTGA | AGG | 85.8 | 5271 |
| WASp_T250 | GGAACGGCACATCTCCAGTT | GGG | 85.7 | 5272 |
| WASp_T103 | TAAAACTAGGATGTCCAGTG | GGG | 82.7 | 5273 |
| WASp_T263 | CTGAGCAGTCAGTGTGTGCT | AGG | 81.5 | 5274 |
| WASp_T20 | CCAGTAGTGCTTACTTTGTG | GGG | 81.1 | 5275 |
| WASp_T267 | GGTATTGAAGCATTGAATGA | AGG | 78.3 | 5276 |
| WASp_T110 | CTTTAAAAAAGGGATGGGCT | GGG | 78.3 | 5277 |
| WASp_T246 | TGACATTCCCAGGTACCTGA | AGG | 78.2 | 5278 |
| WASp_T224 | ACACATCTCCTGGTCCACAT | AGG | 77.9 | 5279 |
| WASp_T230 | ACGGGAATCTGAGGGCTGTA | GGG | 77.3 | 5280 |
| WASp_T94 | GGCCTGCCTGGCTCGCACTC | CGG | 76.5 | 5281 |
| WASp_T44 | TTGGAACTGCCACTGCAGAA | GGG | 76.1 | 5282 |
| WASp_T227 | GACTCTCAGACGGGAATCTG | AGG | 76.1 | 5283 |
| WASp_T74 | TGAGAGTCTGCATGCCTATG | TGG | 74.2 | 5284 |
| WASp_T145 | CTGCGGGGAGGCAAGGGTAA | GGG | 72.6 | 5285 |
| WASp_T252 | GTCCTTCCTGGAAACTTCCA | TGG | 72.2 | 5286 |
| WASp_T32 | TGCCCTGATCAGCAGGTTGG | AGG | 71.8 | 5287 |
| WASp_T237 | CAGATACAGGAACAGCAGTT | TGG | 71.7 | 5288 |
| WASp_T35 | CCCGAAGCTTAGCTGTGAGT | GGG | 70.8 | 5289 |
| WASp_T19 | GCCAGTAGTGCTTACTTTGT | GGG | 70.3 | 5290 |
| WASp_T266 | TTGGACAGATGACACTAAAT | GGG | 70.3 | 5291 |
| WASp_T156 | ACGATAGGCGTGGATCACAG | GGG | 69.7 | 5292 |
| WASp_T88 | ACAGCAACAGCCAAGAGTGA | AGG | 68.5 | 5293 |
| WASp_T99 | AAAGGGGTCAGAACAGTGAC | TGG | 68.3 | 5294 |
| WASp_T239 | GATACAGGAACAGCAGTTTG | GGG | 68.2 | 5295 |
| WASp_T34 | GCCCGAAGCTTAGCTGTGAG | TGG | 66.9 | 5296 |
| WASp_T244 | GGGGGAGCTGAGCAGGTCTG | GGG | 66.7 | 5297 |
| WASp_T55 | GAAGGACTGCAGGTCCCAAC | TGG | 66.6 | 5298 |
| WASp_T226 | AGGCATGCAGACTCTCAGAC | GGG | 64.8 | 5299 |
| WASp_T77 | GTGGACCAGGAGATGTGTGC | GGG | 64.8 | 5300 |
| WASp_T79 | AGAACCAGAAGCAGCCCAAA | GGG | 63.6 | 5301 |
| WASp_T233 | CCTCAGTTTCCCCATGTATG | GGG | 63.4 | 5302 |
| WASp_T236 | GACTTGAAGCTCTCAGATAC | AGG | 63.2 | 5303 |
| WASp_T212 | GCAGGCCAGGTGTGAGTGCA | TGG | 61.8 | 5304 |
| WASp_T147 | GGGAGGCAAGGGTAAGGGAT | GGG | 61.8 | 5305 |
| WASp_T231 | GTGAATGCTAGCTCAGTCCC | CGG | 61.4 | 5306 |
| WASp_T97 | TGGCTCGCACTCCGGGCAAA | GGG | 61.2 | 5307 |
| WASp_T100 | GTGAGTGTTAAGATAAAACT | AGG | 60.8 | 5308 |
| WASp_T269 | ATTTGATTCAGTGGTTCCAG | AGG | 59.8 | 5309 |
| WASp_T260 | CACCTCCAACCTGCTGATCA | GGG | 59.7 | 5310 |
| WASp_T222 | TGCTTCTGGTTCTTGCTGTT | GGG | 59.4 | 5311 |
| WASP_T89 | AACAGCCAAGAGTGAAGGCG | TGG | 59 | 5312 |
| WASp_T144 | GCTGCGGGGAGGCAAGGGTA | AGG | 58.9 | 5313 |
| WASp_T73 | GGAAATAGTCTGGCATCATC | TGG | 57.8 | 5314 |
| WASp_T45 | TGGAACTGCCACTGCAGAAG | GGG | 5315 | 5315 |
| WASp_T98 | GGCTCGCACTCCGGGCAAAG | GGG | 57.4 | 5316 |
| WASp_T102 | ATAAAACTAGGATGTCCAGT | GGG | 57.2 | 5317 |
| WASp_T59 | GAGAGCTTCAAGTCTCCAAA | TGG | 56.9 | 5318 |
| WASp_T33 | CAGCAGGTTGGAGGTGCTCC | AGG | 56.6 | 5319 |
| WASp_T52 | GGGAAGCCATGGAAGTTTCC | AGG | 56.6 | 5320 |
| WASp_T210 | ATACAGGAACAGCAGTTTGG | GGG | 56.4 | 5321 |
| WASp_T53 | AGCCATGGAAGTTTCCAGGA | AGG | 56 | 5322 |
| WASp_T251 | TTGGGACCTGCAGTCCTTCC | TGG | 55.4 | 5323 |
| WASp_T162 | GTCTTGCTCTGTCATCATCC | AGG | 55.2 | 5324 |
| WASp_T101 | GATAAAACTAGGATGTCCAG | TGG | 54.6 | 5325 |
| WASp_T23 | CTGGAACCACTGAATCAAAT | TGG | 54.5 | 5326 |
| WASp_T51 | CCTGCACGTGTGGGAAGCCA | TGG | 54.4 | 5327 |
| WASp_T21 | ATGTGAAATGAGTTAATAAA | TGG | 54.3 | 5328 |
| WASp_T39 | GCTGTGAGTGGGGACACGGG | AGG | 54.2 | 5329 |
| WASp_T90 | AGCCAAGAGTGAAGGCGTGG | AGG | 53.4 | 5330 |
| WASp_T108 | CCTTTCTTTAAAAAAGGGAT | GGG | 53 | 5331 |
| WASp_T138 | AGAAAGTAATTTGGGAGCTG | CGG | 52.7 | 5332 |
| WASp_T92 | CGAGACCATGCACTCACACC | TGG | 51.6 | 5333 |
| WASp_T206 | TAAAAGCACATAATCTTCAA | AGG | 51.4 | 5334 |
| WASp_T265 | TTTGGACAGATGACACTAAA | TGG | 51.1 | 5335 |
| WASp_T60 | CAAATGGCCTACCTCATACA | TGG | 50 | 5336 |
| WASP_T96 | CTGGCTCGCACTCCGGGCAA | AGG | 49.7 | 5337 |
| WASp_T249 | AGGAACGGCACATCTCCAGT | TGG | 48.4 | 5338 |
| WASp_T50 | GGCTTTGAACCTGCACGTGT | GGG | 48.1 | 5339 |
| WASp_T214 | TGATTCCTGTTTGCCTATAG | TGG | 47.6 | 5340 |
| WASp_T137 | TGACAAGCAGAAAGTAATTT | GGG | 47.6 | 5341 |
| WASp_T24 | AGTGTCATCTGTCCAAATGC | TGG | 47.2 | 5342 |
| WASp_T78 | AAGAACCAGAAGCAGCCCAA | AGG | 47.2 | 5343 |
| WASp_T157 | GGGCTCGCTCTGTAATTAAA | AGG | 47.2 | 5344 |
| WASp_T46 | GCAGAAGGGGTTCTGAACCT | AGG | 46.9 | 5345 |
| WASp_T255 | GTTCAGAACCCCTTCTGCAG | AGG | 46.6 | 5346 |
| WASp_T72 | ATTCACTTGTGGAAATAGTC | TGG | 46.2 | 5347 |
| WASp_T254 | AAAGCCTCTCTCCTGAACCT | AGG | 46.1 | 5348 |
| WASp_T213 | TCCCTCCACGCCTTCACTCT | TGG | 45.9 | 5349 |
| WASp_T104 | AACTAAACAAGATGTTGTTC | AGG | 45.8 | 5350 |
| WASp_T218 | ATTCTCCTGTAACAGCCCTT | TGG | 45.4 | 5351 |
| WASp_T248 | CCAGGTACCTGAAGGAGGAA | CGG | 44.8 | 5352 |
| WASp_T22 | AAAGCACTTAGAAAAGCCTC | TGG | 13.3 | 5353 |
| WASp_T256 | CCCCACTCACAGCTAAGCTT | CGG | 42.9 | 5354 |
| WASp_T238 | AGATACAGGAACAGCAGTTT | GGG | 42.6 | 5355 |
| WASp_T257 | CCCACTCACAGCTAAGCTTC | GGG | 42 | 5356 |
| WASp_T25 | GTCACAATGAACACGTGCAA | TGG | 40.8 | 5357 |
| WASp_T153 | CTAAGCACTCACGATAGGCG | TGG | 39.5 | 5358 |
| WASp_T155 | CACGATAGGCGTGGATCACA | GGG | 39.2 | 5359 |
| WASp_T38 | TTAGCTGTGAGTGGGGACAC | GGG | 38.7 | 5360 |
| WASp_T207 | AAGGCTTGCTTTCTCCCCAC | TGG | 38.7 | 5361 |
| WASp_T247 | CATTCCCAGGTACCTGAAGG | AGG | 38.3 | 5362 |
| WASp_T63 | CCTCATACATGGGGAAACTG | AGG | 38.3 | 5363 |
| WASp_T186 | GCCAATGACGCATATGCCTC | TGG | 38.2 | 5364 |
| WASp_T270 | CCCCACAAAGTAAGCACTAC | TGG | 37.9 | 5365 |
| WASp_T54 | AAGTTTCCAGGAAGGACTGC | AGG | 37.5 | 5366 |
| WASp_T163 | TGCTCTGTCATCATCCAGGC | TGG | 37.1 | 5367 |
| WASp_T264 | CTAGGCGTATCTCCAGCATT | TGG | 36.8 | 5368 |
| WASp_T31 | GCTTGCCCTGATCAGCAGGT | TGG | 36.5 | 5369 |
| WASp_T43 | GTTGGAACTGCCACTGCAGA | TGG | 36.5 | 5370 |
| WASp_T232 | GCTCAGTCCCCGGCCTCCCC | AGG | 36.2 | 5371 |
| WASp_T71 | ACTGAGCTAGCATTCACTTG | TGG | 35.3 | 5372 |
| WASp_T36 | CCGAAGCTTAGCTGTGAGTG | GGG | 35 | 5373 |
| WASp_T95 | GCCTGCCTGGCTCGCACTCC | GGG | 34 | 5374 |
| WASp_T47 | GGGGTTCTGAACCTAGGTTC | AGG | 33.7 | 5375 |
| WASp_T259 | GCACCTCCAACCTGCTGATC | AGG | 33.6 | 5376 |
| WASp_T142 | TTGGGAGCTGCGGGGAGGCA | AGG | 33.1 | 5377 |
| WASp_T208 | ACTGTTCTGACCCCTTTGCC | CGG | 32.6 | 5378 |
| WASp_T210 | GCCCGGAGTGCGAGCCAGGC | AGG | 32.1 | 5379 |
| WASp_T234 | AGTTTCCCCATGTATGAGGT | AGG | 31.4 | 5380 |
| WASp_T211 | GAGTGCGAGCCAGGCAGGCC | AGG | 31.2 | 5381 |
| WASp_T58 | CGTTCCTCCTTCAGGTACCT | GGG | 31.1 | 5382 |
| WASp_T61 | AAATGGCCTACCTCATACAT | AGG | 31.1 | 5383 |
| WASp_T151 | ACCAGAGGCATATGCGTCAT | TGG | 31.1 | 5384 |
| WASp_T75 | TCTGCATGCCTATGTGGACC | AGG | 30.8 | 5385 |
| WASp_T235 | CATGTATGAGGTAGGCCATT | TGG | 30.6 | 5386 |
| WASp_T37 | CTTAGCTGTGAGTGGGGACA | CGG | 29.9 | 5387 |
| WASp_T229 | GACGGGAATCTGAGGGCTGT | AGG | 29.9 | 5388 |
| WASp _T243 | TGGGGGAGCTGAGCAGGTCT | GGG | 29.8 | 5389 |
| WASp_T253 | CCATGGCTTCCCACACGTGC | TGG | 29.7 | 5390 |
| WASp_T48 | TGAACCTAGGTTCAGGAGAG | AGG | 29.5 | 5391 |
| WASp_T216 | CATGGTGTGCATGTGCAGCC | TGG | 29.4 | 5392 |
| WASp_T148 | GGAGGCAAGGGTAAGGGATG | GGG | 29.3 | 5393 |
| WASp_T225 | TAGGCATGCAGACTCTCAGA | CGG | 28.9 | 5394 |
| WASp_T261 | GATCAGGGCAAGCCCCGATG | TGG | 28 | 5395 |
| WASp_T271 | ACAAAGTAAGCACTACTGGC | CGG | 27.5 | 5396 |
| WASp_T57 | CCGTTCCTCCTTCAGGTACC | TGG | 27 | 5397 |
| WASp_T40 | CTGTGAGTGGGGACACGGGA | GGG | 26.7 | 5398 |
| WASp_T158 | GCTCTGTAATTAAAAGGAAA | AGG | 26.7 | 5399 |
| WASp_T268 | TGATATCCAATTTGATTCAG | TGG | 25.8 | 5400 |
| WASp_T223 | TCACTCCCGCACACATCTCC | TGG | 25.6 | 5401 |
| WASp_T241 | GCAGTTTGGGGGAGCTGAGC | AGG | 25.1 | 5402 |
| WASp_T150 | GGGATGGGGAAGTGGACCAG | AGG | 25.1 | 5403 |
| WASp_T258 | TCACAGCTAAGCTTCGGGCC | TGG | 24.3 | 5404 |
| WASp_T62 | AATGGCCTACCTCATACATG | GGG | 24 | 5405 |
| WASp_T152 | AGTGTCTAAGCACTCACGAT | AGG | 22.4 | 5406 |
| WASp_T242 | TTGGGGGAGCTGAGCAGGTC | TGG | 21.3 | 5407 |
| WASp_T221 | CTGCTTCTGGTTCTTGCTGT | TGG | 20.4 | 5408 |
| WASp_T154 | TCACGATAGGCGTGGATCAC | AGG | 20.3 | 5409 |
| WASp_T56 | AGATGTGCCGTTCCTCCTTC | AGG | 20.1 | 5410 |
| WASp_T12 | GAACTCCTGACCTCGTGATC | TGG | 19.2 | 5411 |
| WASp_T93 | GCACTCACACCTGGCCTGCC | TGG | 18 | 5412 |
| WASp_T149 | AAGGGTAAGGGATGGGGAAG | TGG | 18 | 5413 |
| WASp_T159 | CTCTGTAATTAAAAGGAAAA | GGG | 17.6 | 5414 |
| WASp_T41 | TGAGTGGGGACACGGGAGGG | AGG | 17.5 | 5415 |
| WASp_T27 | AATGGCCTTGAAGGCCACAT | CGG | 15.9 | 5416 |
| WASp_T205 | CCCATCCCTTTTTTAAAGAA | AGG | 15.8 | 5417 |
| WASp_T49 | AGGCTTTGAACCTGCACGTG | AGG | 14.4 | 5418 |
| WASp_T262 | AAGCCCCGATGTGGCCTTCA | AGG | 12 | 5419 |
| WASp_T5 | AGGTGTGCACCACCACACCA | GGG | 11.3 | 5420 |
| WASp_T80 | GCAGCCCAAAGGGCTGTTAC | AGG | 11 | 5421 |
| WASp_T272 | CAAAGTAAGCACTACTGGCC | GGG | 10.8 | 5422 |
| WASp_T209 | CTTTGCCCGGAGTGCGAGCC | AGG | 9.9 | 5423 |
| WASp_T109 | TCTTTAAAAAAGGGATGGGC | TGG | 9.7 | 5424 |
| WASp T29 | TGGCCTTGAAGGCCACATCG | GGG | 9.5 | 5425 |
| WASp_T67 | GGGGAAACTGAGGCCTGGGG | AGG | 9.2 | 5426 |
| WASp_T30 | CGGGGCTTGCCCTGATCAGC | AGG | 9 | 5427 |
| WASp_T70 | ACTGAGGCCTGGGGAGGCCG | GGG | 8.7 | 5428 |
| WASp_T273 | TAAGCACTACTGGCCGGGTG | CGG | 8.1 | 5429 |
| WASp_T76 | TGTGGACCAGGAGATGTGTG | CGG | 7.7 | 5430 |
| WASp_T42 | TGGGGACACGGGAGGGAGGT | TGG | 7.5 | 5431 |
| WASp_T69 | AACTGAGGCCTGGGGAGGCC | GGG | 7.5 | 5432 |
| WASp_T28 | ATGGCCTTGAAGGCCACATC | GGG | 7 | 5433 |
| WASp_T106 | AAGTTCCTTTCTTTAAAAAA | GGG | 6.9 | 5434 |
| WASp_T141 | GTAATTTGGGAGCTGCGGGG | AGG | 6.9 | 5435 |
| WASp_T161 | TGTTGCTGTTTTTGAGACAA | GGG | 6.7 | 5436 |
| WASp_T217 | ATGGTGTGCATGTGCAGCCT | GGG | 5 | 5437 |
| WASp_T107 | TCCTTTCTTTAAAAAAGGGA | TGG | 4.3 | 5438 |
| WASp_T139 | GAAAGTAATTTGGGAGCTGC | GGG | 3.9 | 5439 |
| WASp_T105 | AAAGTTCCTTTCTTTAAAAA | AGG | 3.6 | 5440 |
| WASp_T136 | ATGACAAGCAGAAAGTAATT | TGG | 3.5 | 5441 |
| WASp_T68 | AAACTGAGGCCTGGGGAGGC | CGG | 2.5 | 5442 |
| WASp_T220 | ACAGCCCTTTGGGCTGCTTC | TGG | 2.2 | 5443 |
| WASp_T219 | TTCTCCTGTAACAGCCCTTT | GGG | 1.9 | 5444 |
| WASp_T228 | ACTCTCAGACGGGAATCTGA | GGG | TBD | 5445 |
| WASp_T81 | AGGGCTGTTACAGGAGAATA | TGG | TBD | 5446 |
| WASp_T82 | ACAGGAGAATATGGACACCC | AGG | TBD | 5447 |
| WASp T83 | CAGGCTGCACATGCACACCA | TGG | TBD | 5448 |
| WASp_T215 | CACTGCCATACAGCATTCCA | TGG | TBD | 5449 |
| WASp_T84 | GCACACCATGGAATGCTGTA | TGG | TBD | 5450 |
| WASp_T85 | CATGGAATGCTGTATGGCAG | TGG | TBD | 5451 |
| WASp_T86 | AAATGAACAGCTACCACTAT | AGG | TBD | 5452 |
| WASp_T87 | AGCTACCACTATAGGCAAAC | AGG | TBD | 5453 |
| WASp_T143 | TGGGAGCTGCGGGGAGGCAA | GGG | TBD | 5454 |

[0286] In some embodiments, gRNAs that can be used for genome-edition in accordance with the present disclosures can be a nucleic acid sequence that can target sites at, within, or near the WAS gene. The gRNA can target any sites, e.g, from any introns, any exons, any sequence junctioning an exon and intron (or vice versa) and any regulatory sequence such as upstream and downstream sequences of the WAS gene locus.

[0287] In some embodiments, gRNAs that can be used for genome-edition in accordance with the present disclosures can be a nucleic acid sequence that can target sites at, within, or near a safe harbor locus or a safe harbor site. In some embodiments, a safe-harbor locus is selected from the group consisting of albumin gene, an AAVS1 gene, an HRPT gene, a CCR5 gene, a globin gene, TTR gene, TF gene, F9 gene, Alb gene, Gys2 gene and PCSK9 gene. In some embodiments, a safe harbor site is selected from the group consisting of the following regions: AAVS1 19q13.4-qter, HRPT 1q31.2, CCR5 3p21.31. Globin 11p15.4, TTR 18q12.1, TF 3q22.1, F9 Xq27.1, Alb 4q13.3, Gys2 12p12.1 and PCSK9 1p32.3.

[0288] In some embodiments, gRNAs that can be used for genome-edition in accordance with the present disclosures can be a nucleic acid sequence that can target sites at, within, or near the AAVS1 gene. The gRNA can target any sites, e.g, from any introns, any exons, any sequence junctioning an exon and intron (or vice versa) and any regulatory sequence such as upstream and downstream sequences of the AAVS1 gene locus.

### Minimum CRISPR Repeat Sequence

[0289] A minimum CRISPR repeat sequence can be a sequence with at least about 300%, about 40%, about 50%, about 60%, about 65%, about 70%, about 75%, about 800%, about 85%, about 90%, about 95%, or 100% sequence identity to a reference CRISPR repeat sequence (e.g., crRNA from S. pyogenes).

[0290] A minimum CRISPR repeat sequence can have nucleotides that can hybridize to a minimum tracrRNA sequence in a cell. The minimum CRISPR repeat sequence and a minimum tracrRNA sequence can form a duplex, i.e, a base-paired double-stranded structure. Together, the minimum CRISPR repeat sequence and the minimum tracrRNA sequence can bind to the site-directed polypeptide. At least a part of the minimum CRISPR repeat sequence can hybridize to the minimum tracrRNA sequence. At least a part of the minimum CRISPR repeat sequence can have at least about 30%, about 40%, about 50%, about 60%, about 65%, about 70%, about 75%, about 80%, about 85%, about 90.6, about 95%, or 100% complementary to the minimum tracrRNA sequence. At least a part of the minimum CRISPR repeat sequence can have at most about 30%, about 40%, about 50%, about 60%, about 65%, about 70%, about 75%, about 80%, about 85%, about 90%, about 95%, or 100% complementary to the minimum tracrRNA sequence.

[0291] The minimum CRISPR repeat sequence can have a length from about 7 nucleotides to about 100 nucleotides. For example, the length of the minimum CRISPR repeat sequence is from about 7 nucleotides (nt) to about 50 nt, from about 7 nt to about 40 nt, from about 7 nt to about 30 nt, from about 7 nt to about 25 nt, from about 7 nt to about 20 nt, from about 7 nt to about 15 nt, from about 8 nt to about 40 nt, from about 8 nt to about 30 nt, from about 8 nt to about 25 nt, from about 8 nt to about 20 nt, from about 8 nt to about 15 nt, from about 15 nt to about 100 nt, from about 15 nt to about 80 nt, from about 15 nt to about 50 nt, from about 15 nt to about 40 nt, from about 15 nt to about 30 nt, or from about 15 nt to about 25 nt. In some examples, the minimum CRISPR repeat sequence can be approximately 9 nucleotides in length. The minimum CRISPR repeat sequence can be approximately 12 nucleotides in length.

[0292] The minimum CRISPR repeat sequence can be at least about 60% identical to a reference minimum CRISPR repeat sequence (e.g., wild-type crRNA from S. pyogenes) over a stretch of at least 6, 7, or 8 contiguous nucleotides. For example, the minimum CRISPR repeat sequence can be at least about 65% identical, at least about 70% identical, at least about 75% identical, at least about 80% identical, at least about 85% identical, at least about 90% identical, at least about 95% identical, at least about 98% identical, at least about 99% identical or 100% identical to a reference minimum CRISPR repeat sequence over a stretch of at least 6, 7, or 8 contiguous nucleotides.

Minimum tracrRNA Sequence

[0293] A minimum tracrRNA sequence can be a sequence with at least about 30%, about 40%, about 50%, about 60%, about 65%, about 70%, about 75%, about 80%, about 85%, about 90%, about 95%, or 100% sequence identity to a reference tracrRNA sequence (e.g., wild type tracrRNA from S. pyogenes).

[0294] A minimum tracrRNA sequence can have nucleotides that hybridize to a minimum CRISPR repeat sequence in a cell. A minimum tracrRNA sequence and a minimum CRISPR repeat sequence form a duplex, i.e, a base-paired double-stranded structure. Together, the minimum tracrRNA sequence and the minimum CRISPR repeat can bind to a site-directed polypeptide. At least a part of the minimum tracrRNA sequence can hybridize to the minimum CRISPR repeat sequence. The minimum tracrRNA sequence can be at least about 30%, about 40%, about 50%, about 60%, about 65%, about 70%, about 75%, about 80%, about 85%, about 90%, about 95%, or 100% complementary to the minimum CRISPR repeat sequence.

[0295] The minimum tracrRNA sequence can have a length from about 7 nucleotides to about 100 nucleotides. For example, the minimum tracrRNA sequence can be from about 7 nucleotides (nt) to about 50 nt, from about 7 nt to about 40 nt, from about 7 nt to about 30 nt, from about 7 nt to about 25 nt, from about 7 nt to about 20 nt, from about 7 nt to about 15 nt, from about 8 nt to about 40 nt, from about 8 nt to about 30 nt, from about 8 nt to about 25 nt, from about 8 nt to about 20 nt, from about 8 nt to about 15 nt, from about 15 nt to about 100 nt, from about 15 nt to about 80 nt, from about 15 nt to about 50 nt, from about 15 nt to about 40 nt, from about 15 nt to about 30 nt or from about 15 nt to about 25 nt long. The minimum tracrRNA sequence can be approximately 9 nucleotides in length. The minimum tracrRNA sequence can be approximately 12 nucleotides. The minimum tracrRNA can consist of tracrRNA nt 23-48 described in Jinek et al., supra.

[0296] The minimum tracrRNA sequence can be at least about 60% identical to a reference minimum tracrRNA (e.g., wild type, tracrRNA from S. pyogenes) sequence over a stretch of at least 6, 7, or 8 contiguous nucleotides. For example, the minimum tracrRNA sequence can be at least about 65% identical, about 70% identical, about 75% identical, about 80% identical, about 85% identical, about 90% identical, about 95% identical, about 98% identical, about 99% identical or 100% identical to a reference minimum tracrRNA sequence over a stretch of at least 6, 7, or 8 contiguous nucleotides.

[0297] The duplex between the minimum CRISPR RNA and the minimum tracrRNA can have a double helix. The duplex between the minimum CRISPR RNA and the minimum tracrRNA can have at least about 1, 2, 3, 4, 5, 6, 7, 8, 9, or 10 or more nucleotides. The duplex between the minimum CRISPR RNA and the minimum tracrRNA can have at most about 1, 2, 3, 4, 5, 6, 7, 8, 9, or 10 or more nucleotides.

[0298] The duplex can have a mismatch (i.e., the two strands of the duplex are not 100% complementary). The duplex can have at least about 1, 2, 3, 4, or 5 or mismatches. The duplex can have at most about 1, 2, 3, 4, or 5 or mismatches. The duplex can have no more than 2 mismatches.

### Bulges

[0299] In some cases, there can be a “bulge” in the duplex between the minimum CRISPR RNA and the minimum tracrRNA. A bulge is an unpaired region of nucleotides within the duplex. A bulge can contribute to the binding of the duplex to the site-directed polypeptide. The bulge can have, on one side of the duplex, an unpaired 5′-XXXY-3′ where X is any purine and Y has a nucleotide that can form a wobble pair with a nucleotide on the opposite strand, and an unpaired nucleotide region on the other side of the duplex. The number of unpaired nucleotides on the two sides of the duplex can be different.

[0300] In one example, the bulge can have an unpaired purine (e.g., adenine) on the minimum CRISPR repeat strand of the bulge. In some examples, the bulge can have an unpaired 5′-AAGY-3′ of the minimum tracrRNA sequence strand of the bulge, where Y has a nucleotide that can form a wobble pairing with a nucleotide on the minimum CRISPR repeat strand.

[0301] bulge on the minimum CRISPR repeat side of the duplex can have at least 1, 2, 3, 4, or 5 or more unpaired nucleotides. A bulge on the minimum CRISPR repeat side of the duplex can have at most 1, 2, 3, 4, or 5 or more unpaired nucleotides. A bulge on the minimum CRISPR repeat side of the duplex can have 1 unpaired nucleotide.

[0302] A bulge on the minimum tracrRNA sequence side of the duplex can have at least 1, 2, 3, 4, 5, 6, 7, 8, 9, or 10 or more unpaired nucleotides. A bulge on the minimum tracrRNA sequence side of the duplex can have at most 1, 2, 3, 4, 5, 6, 7, 8, 9, or 10 or more unpaired nucleotides. A bulge on a second side of the duplex (e.g., the minimum tracrRNA sequence side of the duplex) can have 4 unpaired nucleotides.

[0303] A bulge can have at least one wobble pairing. In some examples, a bulge can have at most one wobble pairing. A bulge can have at least one purine nucleotide. A bulge can have at least 3 purine nucleotides. A bulge sequence can have at least 5 purine nucleotides. A bulge sequence can have at least one guanine nucleotide. In some examples, a bulge sequence can have at least one adenine nucleotide.

### Hairpins

[0304] In various examples, one or more hairpins can be located 3′ to the minimum tracrRNA in the 3′ tracrRNA sequence.

[0305] The hairpin can start at least about 1, 2, 3, 4, 5, 6, 7, 8, 9, 10, 15, or 20 or more nucleotides 3′ from the last paired nucleotide in the minimum CRISPR repeat and minimum tracrRNA sequence duplex. The hairpin can start at most about 1, 2, 3, 4, 5, 6, 7, 8, 9 or 10 or more nucleotides 3′ of the last paired nucleotide in the minimum CRISPR repeat and minimum tracrRNA sequence duplex.

[0306] The hairpin can have at least about 1, 2, 3, 4, 5, 6, 7, 8, 9, 10, 15, or 20 or more consecutive nucleotides. The hairpin can have at most about 1, 2, 3, 4, 5, 6, 7, 8, 9, 10, 15, or more consecutive nucleotides.

[0307] The hairpin can have a CC dinucleotide (i.e., two consecutive cytosine nucleotides).

[0308] The hairpin can have duplexed nucleotides (e.g., nucleotides in a hairpin, hybridized together). For example, a hairpin can have a CC dinucleotide that is hybridized to a GG dinucleotide in a hairpin duplex of the 3′ tracrRNA sequence.

[0309] One or more of the hairpins can interact with guide RNA-interacting regions of a site-directed polypeptide.

[0310] In some examples, there are two or more hairpins, and in other examples there are three or more hairpins.

3′ tracrRNA Sequence

[0311] A 3′ tracrRNA sequence can have a sequence with at least about 30%, about 40%, about 50%, about 60%6, about 65%, about 70%, about 75%, about 80%, about 85%, about 90%, about 95%, or 100% sequence identity to a reference tracrRNA sequence (e.g., a tracrRNA from S. pyogenes).

[0312] The 3′ tracrRNA sequence can have a length from about 6 nucleotides to about 100 nucleotides. For example, the 3′ tracrRNA sequence can have a length from about 6 nucleotides (nt) to about 50 nt, from about 6 nt to about 40 nt, from about 6 nt to about 30 nt, from about 6 nt to about 25 nt, from about 6 nt to about 20 nt, from about 6 nt to about 15 nt, from about 8 nt to about 40 nt, from about 8 nt to about 30 nt, from about 8 nt to about 25 nt, from about 8 nt to about 20 nt, from about 8 nt to about 15 nt, from about 15 nt to about 100 nt, from about 15 nt to about 80 nt, from about 15 nt to about 50 nt, from about 15 nt to about 40 nt, from about 15 nt to about 30 nt, or from about 15 nt to about 25 nt. The 3′ tracrRNA sequence can have a length of approximately 14 nucleotides.

[0313] The 3′ tracrRNA sequence can be at least about 60% identical to a reference 3′ tracrRNA sequence (e.g., wild type 3′ tracrRNA sequence from S. pyogenes) over a stretch of at least 6, 7, or 8 contiguous nucleotides. For example, the 3′ tracrRNA sequence can be at least about 60% identical, about 65% identical, about 70% identical, about 75% identical, about 80% identical, about 85% identical, about 90% identical, about 95% identical, about 98% identical, about 99% identical, or 100% identical, to a reference 3′ tracrRNA sequence (e.g., wild type 3′ tracrRNA sequence from S. pyogenes) over a stretch of at least 6, 7, or 8 contiguous nucleotides.

[0314] The 3′ tracrRNA sequence can have more than one duplexed region (e.g., hairpin, hybridized region). The 3′ tracrRNA sequence can have two duplexed regions.

[0315] The 3′ tracrRNA sequence can have a stem loop structure. The stem loop structure in the 3′ tracrRNA can have at least 1, 2, 3, 4, 5, 6, 7, 8, 9, 10, 15 or 20 or more nucleotides. The stem loop structure in the 3′ tracrRNA can have at most 1, 2, 3, 4, 5, 6, 7, 8, 9 or 10 or more nucleotides. The stem loop structure can have a functional moiety. For example, the stem loop structure can have an aptamer, a ribozyme, a protein-interacting hairpin, a CRISPR array, an intron, or an exon. The stem loop structure can have at least about 1, 2, 3, 4, or 5 or more functional moieties. The stem loop structure can have at most about 1, 2, 3, 4, or 5 or more functional moieties.

[0316] The hairpin in the 3′ tracrRNA sequence can have a P-domain. In some examples, the P-domain can have a double-stranded region in the hairpin.

tracrRNA Extension Sequence

[0317] A tracrRNA extension sequence may be provided whether the tracrRNA is in the context of single-molecule guides or double-molecule guides. The tracrRNA extension sequence can have a length from about 1 nucleotide to about 400 nucleotides. The tracrRNA extension sequence can have a length of more than 1, 5, 10, 15, 20, 25, 30, 35, 40, 45, 50, 60, 70, 80, 90, 100, 120, 140, 160, 180, 200, 220, 240, 260, 280, 300, 320, 340, 360, 380, or 400 nucleotides. The tracrRNA extension sequence can have a length from about 20 to about 5000 or more nucleotides. The tracrRNA extension sequence can have a length of more than 1000 nucleotides. The tracrRNA extension sequence can have a length of less than 1, 5, 10, 15, 20, 25, 30, 35, 40, 45, 50, 60, 70, 80, 90, 100, 120, 140, 160, 180, 200, 220, 240, 260, 280, 300, 320, 340, 360, 380, 400 or more nucleotides. The tracrRNA extension sequence can have a length of less than 1000 nucleotides. The tracrRNA extension sequence can have less than 10 nucleotides in length. The tracrRNA extension sequence can be 10-30 nucleotides in length. The tracrRNA extension sequence can be 30-70 nucleotides in length.

[0318] The tracrRNA extension sequence can have a functional moiety (e.g., a stability control sequence, ribozyme, endoribonuclease binding sequence). The functional moiety can have a transcriptional terminator segment (i.e., a transcription termination sequence). The functional moiety can have a total length from about 10 nucleotides (nt) to about 100 nucleotides, from about 10 nt to about 20 nt, from about 20 nt to about 30 nt, from about 30 nt to about 40 nt, from about 40 nt to about 50 nt, from about 50 nt to about 60 nt, from about 60 nt to about 70 nt, from about 70 nt to about 80 nt, from about 80 nt to about 90 nt, or from about 90 nt to about 100 nt, from about 15 nt to about 80 nt, from about 15 nt to about 50 nt, from about 15 nt to about 40 nt, from about 15 nt to about 30 nt, or from about 15 nt to about 25 nt. The functional moiety can function in a eukaryotic cell. The functional moiety can function in a prokaryotic cell. The functional moiety can function in both eukaryotic and prokaryotic cells.

[0319] Non-limiting examples of suitable tracrRNA extension functional moieties include a 3′ poly-adenylated tail, a riboswitch sequence (e.g., to allow for regulated stability and/or regulated accessibility by proteins and protein complexes), a sequence that forms a dsRNA duplex (i.e., a hairpin), a sequence that targets the RNA to a subcellular location (e.g., nucleus, mitochondria, chloroplasts, and the like), a modification or sequence that provides for tracking (e.g., direct conjugation to a fluorescent molecule, conjugation to a moiety that facilitates fluorescent detection, a sequence that allows for fluorescent detection, etc.), and/or a modification or sequence that provides a binding site for proteins (e.g., proteins that act on DNA, including transcriptional activators, transcriptional repressors. DNA methyltransferases, DNA demethylases, histone acetyltransferases, histone deacetylases, and the like). The tracrRNA extension sequence can have a primer binding site or a molecular index (e.g., barcode sequence). The tracrRNA extension sequence can have one or more affinity tags.

### Signal-Molecule Guide Linker Sequence

[0320] The linker sequence of a single-molecule guide nucleic acid can have a length from about 3 nucleotides to about 100 nucleotides. In Jinek et al., supra, for example, a simple 4 nucleotide “tetraloop” (-GAAA-) was used, Science, 337(6096):816-821 (2012). An illustrative linker has a length from about 3 nucleotides (nt) to about 90 nt, from about 3 nt to about 80 nt, from about 3 nt to about 70 nt, from about 3 nt to about 60 nt, from about 3 nt to about 50 nt, from about 3 nt to about 40 nt, from about 3 nt to about 30 nt, from about 3 nt to about 20 nt, from about 3 nt to about 10 nt. For example, the linker can have a length from about 3 nt to about 5 nt, from about 5 nt to about 10 nt, from about 10 nt to about 15 nt, from about 15 nt to about 20 nt, from about 20 nt to about 25 nt, from about 25 nt to about 30 nt, from about 30 nt to about 35 nt, from about 35 nt to about 40 nt, from about 40 nt to about 50 nt, from about 50 nt to about 60 nt, from about 60 nt to about 70 nt, from about 70 nt to about 80 nt, from about 80 nt to about 90 nt, or from about 90 nt to about 100 nt. The linker of a single-molecule guide nucleic acid can be between 4 and 40 nucleotides. The linker can be at least about 100, 500, 1000, 1500, 2000, 2500, 3000, 3500, 4000, 4500, 5000, 5500, 6000, 6500, or 7000 or more nucleotides. The linker can be at most about 100, 500, 1000, 1500, 2000, 2500, 3000, 3500, 4000, 4500, 5000, 5500, 6000, 6500, or 7000 or more nucleotides.

[0321] Linkers can have any of a variety of sequences, although in some examples the linker will not have sequences that have extensive regions of homology with other portions of the guide RNA, which might cause intramolecular binding that could interfere with other functional regions of the guide. In Jinek et al., supra, a simple 4 nucleotide sequence -GAAA- was used, Science, 337(6096):816-821 (2012), but numerous other sequences, including longer sequences can likewise be used.

[0322] The linker sequence can have a functional moiety. For example, the linker sequence can have one or more features, including an aptamer, a ribozyme, a protein-interacting hairpin, a protein binding site, a CRISPR array, an intron, or an exon. The linker sequence can have at least about 1, 2, 3, 4, or 5 or more functional moieties. In some examples, the linker sequence can have at most about 1, 2, 3, 4, or 5 or more functional moieties.

[0323] Genome engineering strategies include correcting cells by insertion or correction of one or more mutations at, within, or near the WAS gene, or by knocking-in WAS gene cDNA into the locus of the corresponding WAS gene or safe harbor site.

[0324] The methods of the present disclosure can involve correction of one or both of the mutant alleles. Gene editing to correct the mutation has the advantage of restoration of correct expression levels and temporal control. Sequencing the patient's WAS gene alleles allows for design of the gene editing strategy to best correct the identified mutation(s).

[0325] A step of the ex vivo methods of the present disclosure can have editing/correcting the patient specific iPSC cells using genome engineering. Alternatively, a step of the ex vivo methods of the present disclosure can have editing/correcting the progenitor cell, primary hepatocyte, or mesenchymal stem cell. Likewise, a step of the in vivo methods of the disclosure involves editing/correcting the cells in Wiskott-Aldrich Syndrome (WAS) patient using genome engineering. Similarly, a step in the cellular methods of the present disclosure can have editing/correcting the WAS gene in a human cell by genome engineering.

[0326] Wiskott-Aldrich Syndrome (WAS) patients exhibit a wide range of mutations in the WAS gene. Therefore, different patients will generally require different correction strategies. Any CRISPR endonuclease may be used in the methods of the present disclosure, each CRISPR endonuclease having its own associated PAM, which may or may not be disease specific.

[0327] For example, the mutation can be corrected by the insertions or deletions that arise due to the imprecise NHEJ repair pathway. If the patient's WAS gene has an inserted or deleted base, a targeted cleavage can result in a NHEJ-mediated insertion or deletion that restores the frame. Missense mutations can also be corrected through NHEJ-mediated correction using one or more guide RNA. The ability or likelihood of the cut(s) to correct the mutation can be designed or evaluated based on the local sequence and micro-homologies. NHEJ can also be used to delete segments of the gene, either directly or by altering splice donor or acceptor sites through cleavage by one gRNA targeting several locations, or several gRNAs. This may be useful if an amino acid, domain or exon contains the mutations and can be removed or inverted, or if the deletion otherwise restored function to the protein. Pairs of guide strands have been used for deletions and corrections of inversions.

[0328] Alternatively, the donor for correction by HDR contains the corrected sequence with small or large flanking homology arms to allow for annealing. HDR is essentially an error-free mechanism that uses a supplied homologous DNA sequence as a template during DSB repair. The rate of homology directed repair (HDR) is a function of the distance between the mutation and the cut site so choosing overlapping or nearest target sites is important. Templates can include extra sequences flanked by the homologous regions or can contain a sequence that differs from the genomic sequence, thus allowing sequence editing.

[0329] In addition to correcting mutations by NHEJ or HDR, a range of other options are possible. If there are small or large deletions or multiple mutations, a cDNA can be knocked in that contains the exons affected. A full length cDNA can be knocked into any “safe harbor”, but must use a supplied or other promoter. If this construct is knocked into the correct location, it will have physiological control, similar to the normal gene. Pairs of nucleases can be used to delete mutated gene regions, though a donor would usually have to be provided to restore function. In this case two gRNA would be supplied and one donor sequence.

[0330] Some genome engineering strategies involve correction of one or more mutations in or near the WAS gene, or knocking-in WAS gene cDNA into the locus of the corresponding gene or a safe harbor locus by homology directed repair (HDR), which is also known as homologous recombination (HR). Homology directed repair can be one strategy for treating patients that have one or more mutations in or near the WAS gene. These strategies can restore the WAS gene and reverse, treat, and/or mitigate the diseased state. These strategies can require a more custom approach based on the location of the patient's mutation(s). Donor nucleotides for correcting mutations often are small (<300 bp). This is advantageous, as HDR efficiencies may be inversely related to the size of the donor molecule. Also, it is expected that the donor templates can fit into size constrained adeno-associated virus (AAV) molecules, which have been shown to be an effective means of donor template delivery.

[0331] Homology direct repair is a cellular mechanism for repairing double-stranded breaks (DSBs). The most common form is homologous recombination. There are additional pathways for HDR, including single-strand annealing and alternative-HDR. Genome engineering tools allow researchers to manipulate the cellular homologous recombination pathways to create site-specific modifications to the genome. It has been found that cells can repair a double-stranded break using a synthetic donor molecule provided in trans. Therefore, by introducing a double-stranded break near a specific mutation and providing a suitable donor, targeted changes can be made in the genome. Specific cleavage increases the rate of HDR more than 1,000 fold above the rate of 1 in 10⁶ cells receiving a homologous donor alone. The rate of homology directed repair (HDR) at a particular nucleotide is a function of the distance to the cut site, so choosing overlapping or nearest target sites is important. Gene editing offers the advantage over gene addition, as correcting in situ leaves the rest of the genome unperturbed.

[0332] Supplied donors for editing by HDR vary markedly but can contain the intended sequence with small or large flanking homology arms to allow annealing to the genomic DNA. The homology regions flanking the introduced genetic changes can be 30 bp or smaller, or as large as a multi-kilobase cassette that can contain promoters, cDNAs, etc. Both single-stranded and double-stranded oligonucleotide donors have been used. These oligonucleotides range in size from less than 100 nt to over many kb, though longer ssDNA can also be generated and used. Double-stranded donors can be used, including PCR amplicons, plasmids, and mini-circles. In general, it has been found that an AAV vector can be a very effective means of delivery of a donor template, though the packaging limits for individual donors is <5 kb. Active transcription of the donor increased HDR three-fold, indicating the inclusion of promoter may increase conversion. Conversely, CpG methylation of the donor decreased gene expression and HDR

[0333] In addition to wildtype endonucleases, such as Cas9, nickase variants exist that have one or the other nuclease domain inactivated resulting in cutting of only one DNA strand. HDR can be directed from individual Cas nickases or using pairs of nickases that flank the target area. Donors can be single-stranded, nicked, or dsDNA.

[0334] The donor DNA can be supplied with the nuclease or independently by a variety of different methods, for example by transfection, nano-particle, micro-injection, or viral transduction. The method of transfection may include reagent or chemical transfection which include lipid based or salt/chemical based transfection. A range of tethering options have been proposed to increase the availability of the donors for HDR. Examples include attaching the donor to the nuclease, attaching to DNA binding proteins that bind nearby, or attaching to proteins that are involved in DNA end binding or repair.

[0335] The repair pathway choice can be guided by a number of culture conditions, such as those that influence cell cycling, or by targeting of DNA repair and associated proteins. For example, to increase HDR key NHEJ molecules can be suppressed, such as KU70, KU80 or DNA ligase IV.

[0336] Without a donor present, the ends from a DNA break or ends from different breaks can be joined using the several nonhomologous repair pathways in which the DNA ends are joined with little or no base-pairing at the junction. In addition to canonical NHEJ, there are similar repair mechanisms, such as alt-NHEJ. If there are two breaks, the intervening segment can be deleted or inverted. NHEJ repair pathways can lead to insertions, deletions or mutations at the joints.

[0337] NHEJ was used to insert a 15-kb inducible gene expression cassette into a defined locus in human cell lines after nuclease cleavage. Maresca, M., Lin, V. G., Guo, N. & Yang, Y., Genome Res 23, 539-546 (2013).

[0338] In addition to genome editing by NHEJ or HDR, site-specific gene insertions have been conducted that use both the NHEJ pathway and HR. A combination approach may be applicable in certain settings, possibly including intron/exon borders. NHEJ may prove effective for ligation in the intron, while the error-free HDR may be better suited in the coding region.

[0339] The WAS gene contains a number of exons. Any one or more of these exons or nearby introns can be repaired in order to correct a mutation and restore WAS protein activity. Alternatively, there are various mutations associated with Wiskott-Aldrich Syndrome (WAS), which are a combination of insertions, deletions, missense, nonsense, frameshift and other mutations, with the common effect of inactivating WAS gene. Any one or more of the mutations can be repaired in order to restore the inactive WAS gene. As a further alternative, WAS gene cDNA or minigene (which may have natural or synthetic enhancer and promoter, one or more exons, and natural or synthetic introns, and natural or synthetic 3′UTR and polyadenylation signal) can be knocked-in to the locus of the corresponding gene or knocked-in to a safe harbor site, such as AAVS1(PPP1R12C), ALB, Angpt13, ApoC3, ASGR2, CCR5, FIX (F9), G6PC, Gys2, HGD, Lp(a), Pcsk9, Serpinal, TF, and/or TTR. The safe harbor locus can be selected from the group consisting of: AAVS1 (PPP1R12C), ALB, Angpt13, ApoC3, ASGR2, CCR5, FIX (F9), G6PC, Gys2, HGD, Lp(a), Pcsk9, Serpinal, TF, and TTR. In some examples, the methods can provide one gRNA or a pair of gRNAs that can be used to facilitate incorporation of a new sequence from a polynucleotide donor template to correct one or more mutations or to knock-in a part of or the entire WAS gene or cDNA.

[0340] The methods can provide gRNA pairs that make a deletion by cutting the gene twice, one gRNA cutting at the 5′ end of one or more mutations and the other gRNA cutting at the 3′ end of one or more mutations that facilitates insertion of a new sequence from a polynucleotide donor template to replace the one or more mutations. The cutting can be accomplished by a pair of DNA endonucleases that each makes a DSB in the genome, or by multiple nickases that together make a DSB in the genome.

[0341] Alternatively, the methods can provide one gRNA to make one double-strand cut around one or more mutations that facilitates insertion of a new sequence from a polynucleotide donor template to replace the one or more mutations. The double-strand cut can be made by a single DNA endonuclease or multiple nickases that together make a DSB in the genome.

[0342] Illustrative modifications within the WAS gene include replacements at, within, or near (proximal) to the mutations referred to above, such as within the region of less than 3 kb, less than 2 kb, less than 1 kb, less than 0.5 kb upstream or downstream of the specific mutation. Given the relatively wide variations of mutations in the WAS gene, it will be appreciated that numerous variations of the replacements referenced above (including without limitation larger as well as smaller deletions), would be expected to result in restoration of the WAS gene.

[0343] Such variants can include replacements that are larger in the 5′ and/or 3′ direction than the specific mutation in question, or smaller in either direction. Accordingly, by “near” or “proximal” with respect to specific replacements, it is intended that the SSB or DSB locus associated with a desired replacement boundary (also referred to herein as an endpoint) can be within a region that is less than about 3 kb from the reference locus noted. The SSB or DSB locus can be more proximal and within 2 kb, within 1 kb, within 0.5 kb, or within 0.1 kb. In the case of small replacement, the desired endpoint can be at or “adjacent to” the reference locus, by which it is intended that the endpoint can be within 100 bp, within 50 bp, within 25 bp, or less than about 10 bp to 5 bp from the reference locus.

[0344] Examples having larger or smaller replacements can be expected to provide the same benefit, as long as the WAS protein activity is restored. It is thus expected that many variations of the replacements described and illustrated herein can be effective for ameliorating Wiskott-Aldrich Syndrome (WAS).

[0345] In order to ensure that the pre-mRNA is properly processed following deletion, the surrounding splicing signals can be deleted. Splicing donor and acceptors are generally within 100 base pairs of the neighboring intron. Therefore, in some examples, methods can provide all gRNAs that cut approximately +/−100-3100 bp with respect to each exon/intron junction of interest.

[0346] For any of the genome editing strategies, gene editing can be confirmed by sequencing or PCR analysis.

### Target Sequence Selection

[0347] Shifts in the location of the 5′ boundary and/or the 3′ boundary relative to particular reference loci can be used to facilitate or enhance particular applications of gene editing, which depend in part on the endonuclease system selected for the editing, as further described and illustrated herein.

[0348] In a first non-limiting example of such target sequence selection, many endonuclease systems have rules or criteria that can guide the initial selection of potential target sites for cleavage, such as the requirement of a PAM sequence motif in a particular position adjacent to the DNA cleavage sites in the case of CRISPR Type II or Type V endonucleases.

[0349] In another non-limiting example of target sequence selection or optimization, the frequency of off-target activity for a particular combination of target sequence and gene editing endonuclease (i.e. the frequency of DSBs occurring at sites other than the selected target sequence) can be assessed relative to the frequency of on-target activity. In some cases, cells that have been correctly edited at the desired locus can have a selective advantage relative to other cells. Illustrative, but nonlimiting, examples of a selective advantage include the acquisition of attributes such as enhanced rates of replication, persistence, resistance to certain conditions, enhanced rates of successful engraftment or persistence in vivo following introduction into a patient, and other attributes associated with the maintenance or increased numbers or viability of such cells. In other cases, cells that have been correctly edited at the desired locus can be positively selected for by one or more screening methods used to identify, sort or otherwise select for cells that have been correctly edited. Both selective advantage and directed selection methods can take advantage of the phenotype associated with the correction. In some cases, cells can be edited two or more times in order to create a second modification that creates a new phenotype that is used to select or purify the intended population of cells. Such a second modification could be created by adding a second gRNA for a selectable or screenable marker. In some cases, cells can be correctly edited at the desired locus using a DNA fragment that contains the cDNA and also a selectable marker.

[0350] Whether any selective advantage is applicable or any directed selection is to be applied in a particular case, target sequence selection can also be guided by consideration of off-target frequencies in order to enhance the effectiveness of the application and/or reduce the potential for undesired alterations at sites other than the desired target. As described further and illustrated herein and in the art, the occurrence of off-target activity can be influenced by a number of factors including similarities and dissimilarities between the target site and various off-target sites, as well as the particular endonuclease used. Bioinformatics tools are available that assist in the prediction of off-target activity, and frequently such tools can also be used to identify the most likely sites of off-target activity, which can then be assessed in experimental settings to evaluate relative frequencies of off-target to on-target activity, thereby allowing the selection of sequences that have higher relative on-target activities. Illustrative examples of such techniques are provided herein, and others are known in the art.

[0351] Another aspect of target sequence selection relates to homologous recombination events. Sequences sharing regions of homology can serve as focal points for homologous recombination events that result in deletion of intervening sequences. Such recombination events occur during the normal course of replication of chromosomes and other DNA sequences, and also at other times when DNA sequences are being synthesized, such as in the case of repairs of double-strand breaks (DSBs), which occur on a regular basis during the normal cell replication cycle but can also be enhanced by the occurrence of various events (such as UV light and other inducers of DNA breakage) or the presence of certain agents (such as various chemical inducers). Many such inducers cause DSBs to occur indiscriminately in the genome, and DSBs can be regularly induced and repaired in normal cells. During repair, the original sequence can be reconstructed with complete fidelity, however, in some cases, small insertions or deletions (referred to as “InDels”) are introduced at the DSB site.

[0352] DSBs can also be specifically induced at particular locations, as in the case of the endonucleases systems described herein, which can be used to cause directed or preferential gene modification events at selected chromosomal locations. The tendency for homologous sequences to be subject to recombination in the context of DNA repair (as well as replication) can be taken advantage of in a number of circumstances, and is the basis for one application of gene editing systems, such as CRISPR, in which homology directed repair is used to insert a sequence of interest, provided through use of a “donor” polynucleotide, into a desired chromosomal location.

[0353] Regions of homology between particular sequences, which can be small regions of “microhomology” that can have as few as ten base pairs or less, can also be used to bring about desired deletions. For example, a single DSB can be introduced at a site that exhibits microhomology with a nearby sequence. During the normal course of repair of such DSB, a result that occurs with high frequency is the deletion of the intervening sequence as a result of recombination being facilitated by the DSB and concomitant cellular repair process.

[0354] In some circumstances, however, selecting target sequences within regions of homology can also give rise to much larger deletions, including gene fusions (when the deletions are in coding regions), which may or may not be desired given the particular circumstances.

[0355] The examples provided herein further illustrate the selection of various target regions for the creation of DSBs designed to induce replacements that result in restoration of WAS protein activity, as well as the selection of specific target sequences within such regions that are designed to minimize off-target events relative to on-target events.

### Nucleic Acid Modifications (Chemical and Structural Modifications)

[0356] In some cases, polynucleotides introduced into cells can have one or more modifications that can be used individually or in combination, for example, to enhance activity, stability or specificity, alter delivery, reduce innate immune responses in host cells, or for other enhancements, as further described herein and known in the art.

[0357] In certain examples, modified polynucleotides can be used in the CRISPR/Cas9/Cpf1 system, in which case the guide RNAs (either single-molecule guides or double-molecule guides) and/or a DNA or an RNA encoding a Cas or Cpf1 endonuclease introduced into a cell can be modified, as described and illustrated below. Such modified polynucleotides can be used in the CRISPR/Cas9/Cpf1 system to edit any one or more genomic loci.

[0358] Using the CRISPR/Cas9/Cpf1 system for purposes of nonlimiting illustrations of such uses, modifications of guide RNAs can be used to enhance the formation or stability of the CRISPR/Cas9/Cpf1 genome editing complex having guide RNAs, which can be single-molecule guides or double-molecule, and a Cas or Cpf1 endonuclease. Modifications of guide RNAs can also or alternatively be used to enhance the initiation, stability or kinetics of interactions between the genome editing complex with the target sequence in the genome, which can be used, for example, to enhance on-target activity. Modifications of guide RNAs can also or alternatively be used to enhance specificity, e.g., the relative rates of genome editing at the on-target site as compared to effects at other (off-target) sites.

[0359] Modifications can also or alternatively be used to increase the stability of a guide RNA, e.g., by increasing its resistance to degradation by ribonucleases (RNases) present in a cell, thereby causing its half-life in the cell to be increased. Modifications enhancing guide RNA half-life can be particularly useful in aspects in which a Cas or Cpf1 endonuclease is introduced into the cell to be edited via an RNA that needs to be translated in order to generate endonuclease, because increasing the half-life of guide RNAs introduced at the same time as the RNA encoding the endonuclease can be used to increase the time that the guide RNAs and the encoded Cas or Cpf1 endonuclease co-exist in the cell.

[0360] Modifications can also or alternatively be used to decrease the likelihood or degree to which RNAs introduced into cells elicit innate immune responses. Such responses, which have been well characterized in the context of RNA interference (RNAi), including small-interfering RNAs (siRNAs), as described below and in the art, tend to be associated with reduced half-life of the RNA and/or the elicitation of cytokines or other factors associated with immune responses.

[0361] One or more types of modifications can also be made to RNAs encoding an endonuclease that are introduced into a cell, including, without limitation, modifications that enhance the stability of the RNA (such as by increasing its degradation by RNases present in the cell), modifications that enhance translation of the resulting product (i.e. the endonuclease), and/or modifications that decrease the likelihood or degree to which the RNAs introduced into cells elicit innate immune responses.

[0362] Combinations of modifications, such as the foregoing and others, can likewise be used. In the case of CRISPR/Cas9/Cpf1, for example, one or more types of modifications can be made to guide RNAs (including those exemplified above), and/or one or more types of modifications can be made to RNAs encoding Cas endonuclease (including those exemplified above).

[0363] By way of illustration, guide RNAs used in the CRISPR/Cas9/Cpf1 system, or other smaller RNAs can be readily synthesized by chemical means, enabling a number of modifications to be readily incorporated, as illustrated below and described in the art. While chemical synthetic procedures are continually expanding, purifications of such RNAs by procedures such as high performance liquid chromatography (HPLC, which avoids the use of gels such as PAGE) tends to become more challenging as polynucleotide lengths increase significantly beyond a hundred or so nucleotides. One approach that can be used for generating chemically-modified RNAs of greater length is to produce two or more molecules that are ligated together. Much longer RNAs, such as those encoding a Cas9 endonuclease, are more readily generated enzymatically. While fewer types of modifications are available for use in enzymatically produced RNAs, there are still modifications that can be used to, e.g., enhance stability, reduce the likelihood or degree of innate immune response, and/or enhance other attributes, as described further below and in the art; and new types of modifications are regularly being developed.

[0364] By way of illustration of various types of modifications, especially those used frequently with smaller chemically synthesized RNAs, modifications can have one or more nucleotides modified at the 2′ position of the sugar, in some aspects a 2′-O-alkyl, 2′-O-alkyl-O-alkyl, or 2′-fluoro-modified nucleotide. In some examples, RNA modifications can have 2′-fluoro, 2′-amino or 2′-O-methyl modifications on the ribose of pyrimidines, abasic residues, or an inverted base at the 3′ end of the RNA. Such modifications can be routinely incorporated into oligonucleotides and these oligonucleotides have been shown to have a higher Tm (i.e., higher target binding affinity) than 2′-deoxyoligonucleotides against a given target.

[0365] A number of nucleotide and nucleoside modifications have been shown to make the oligonucleotide into which they are incorporated more resistant to nuclease digestion than the native oligonucleotide; these modified oligos survive intact for a longer time than unmodified oligonucleotides. Specific examples of modified oligonucleotides include those having modified backbones, for example, phosphorothioates, phosphotriesters, methyl phosphonates, short chain alkyl or cycloalkyl intersugar linkages or short chain heteroatomic or heterocyclic intersugar linkages. Some oligonucleotides are oligonucleotides with phosphorothioate backbones and those with heteroatom backbones, particularly CH₂—NH—O—CH₂, CH, ˜N(CH₃)˜O˜CH₂ (known as a methylene(methylimino) or MMI backbone), CH₂—O—N(CH₃)—CH₂, CH₂—N(CH₃)—N(CH₃)—CH₂ and O—N(CH₃)—CH₂—CH₂ backbones, wherein the native phosphodiester backbone is represented as O—P—O—CH); amide backbones [see De Mesmaeker et al., Ace. Chem. Res., 28:366-374 (1995)]; morpholino backbone structures (see Summerton and Weller, U.S. Pat. No. 5,034,506); peptide nucleic acid (PNA) backbone (wherein the phosphodiester backbone of the oligonucleotide is replaced with a polyamide backbone, the nucleotides being bound directly or indirectly to the aza nitrogen atoms of the polyamide backbone, see Nielsen et al., Science 1991, 254, 1497). Phosphorus-containing linkages include, but are not limited to, phosphorothioates, chiral phosphorothioates, phosphorodithioates, phosphotriesters, aminoalkylphosphotriesters, methyl and other alkyl phosphonates having 3′alkylene phosphonates and chiral phosphonates, phosphinates, phosphoramidates having 3′-amino phosphoramidate and aminoalkylphosphoramidates, thionophosphoramidates, thionoalkylphosphonates, thionoalkylphosphotriesters, and boranophosphates having normal 3′-5′ linkages, 2′-5′ linked analogs of these, and those having inverted polarity wherein the adjacent pairs of nucleoside units are linked 3′-5′ to 5′-3′ or 2′-5′ to 5′-2′; see U.S. Pat. Nos. 3,687,808; 4,469,863; 4,476,301; 5,023,243; 5,177,196; 5,188,897; 5,264,423; 5,276,019; 5,278,302; 5,286,717; 5,321,131; 5,399,676; 5,405,939; 5,453,496; 5,455,233; 5,466,677; 5,476,925; 5,519,126; 5,536,821; 5,541,306; 5,550,111; 5,563,253; 5,571,799; 5,587,361; and 5,625,050.

[0366] Morpholino-based oligomeric compounds are described in Braasch and David Corey, Biochemistry, 41(14): 4503-4510 (2002); Genesis, Volume 30, Issue 3, (2001); Heasman, Dev. Biol., 243: 209-214 (2002); Nasevicius et al., Nat. Genet., 26:216-220 (2000); Lacerra et al., Proc. Natl. Acad. Sci., 97: 9591-9596 (2000); and U.S. Pat. No. 5,034,506, issued Jul. 23, 1991.

[0367] Cyclohexenyl nucleic acid oligonucleotide mimetics are described in Wang et al., J. Am. Chem. Soc., 122: 8595-8602 (2000).

[0368] Modified oligonucleotide backbones that do not include a phosphorus atom therein have backbones that are formed by short chain alkyl or cycloalkyl internucleoside linkages, mixed heteroatom and alkyl or cycloalkyl internucleoside linkages, or one or more short chain heteroatomic or heterocyclic internucleoside linkages. These have those having morpholino linkages (formed in part from the sugar portion of a nucleoside); siloxane backbones; sulfide, sulfoxide and sulfone backbones; formacetyl and thioformacetyl backbones; methylene formacetyl and thioformacetyl backbones; alkene containing backbones; sulfamate backbones; methyleneimino and methylenehydrazino backbones; sulfonate and sulfonamide backbones; amide backbones; and others having mixed N, O, S, and CH₂ component parts; see U.S. Pat. Nos. 5,034,506; 5,166,315; 5,185,444; 5,214,134; 5,216,141; 5,235,033; 5,264,562; 5,264,564; 5,405,938; 5,434,257; 5,466,677; 5,470,967; 5,489,677; 5,541,307; 5,561,225; 5,596,086; 5,602,240; 5,610,289; 5,602,240; 5,608,046; 5,610,289; 5,618,704; 5,623,070; 5,663,312; 5,633,360; 5,677,437; and 5,677,439.

[0369] One or more substituted sugar moieties can also be included, e.g., one of the following at the 2′ position: OH, SH, SCH₃, F, OCN, OCH₃OCH₃, OCH₃O(CH₂)n CH₃, O(CH₂)n NH₂, or O(CH₂)n CH₃, where n is from 1 to about 10; C1 to C10 lower alkyl, alkoxyalkoxy, substituted lower alkyl, alkaryl or aralkyl; Cl; Br; CN; CF₃; OCF₃; O—, S—, or N-alkyl; O—, S—, or N-alkenyl; SOCH₃; SO₂CH₃; ONO₂; NO₂; N₃; NH₂; heterocycloalkyl; heterocycloalkaryl; aminoalkylamino; polyalkylamino; substituted silyl; an RNA cleaving group; a reporter group; an intercalator; a group for improving the pharmacokinetic properties of an oligonucleotide; or a group for improving the pharmacodynamic properties of an oligonucleotide and other substituents having similar properties. In some aspects, a modification includes 2′-methoxyethoxy (2′-O—CH₂CH₂OCH₃, also known as 2′-O-(2-methoxyethyl)) (Martin et al, Helv. Chim. Acta, 1995, 78, 486). Other modifications include 2′-methoxy (2′-O—CH₃), 2′-propoxy (2′-OCH₂CH₂CH₃) and 2′-fluoro (2′-F). Similar modifications can also be made at other positions on the oligonucleotide, particularly the 3′ position of the sugar on the 3′ terminal nucleotide and the 5′ position of 5′ terminal nucleotide. Oligonucleotides can also have sugar mimetics, such as cyclobutyls in place of the pentofuranosyl group.

[0370] In some examples, both a sugar and an internucleoside linkage, i.e., the backbone, of the nucleotide units can be replaced with novel groups. The base units can be maintained for hybridization with an appropriate nucleic acid target compound. One such oligomeric compound, an oligonucleotide mimetic that has been shown to have excellent hybridization properties, is referred to as a peptide nucleic acid (PNA). In PNA compounds, the sugar-backbone of an oligonucleotide can be replaced with an amide containing backbone, for example, an aminoethylglycine backbone. The nucleobases can be retained and bound directly or indirectly to aza nitrogen atoms of the amide portion of the backbone. Representative United States patents that teach the preparation of PNA compounds have, but are not limited to, U.S. Pat. Nos. 5,539,082; 5,714,331; and 5,719,262. Further teaching of PNA compounds can be found in Nielsen et al, Science, 254: 1497-1500 (1991).

[0371] Guide RNAs can also include, additionally or alternatively, nucleobase (often referred to in the art simply as “base”) modifications or substitutions. As used herein, “unmodified” or “natural” nucleobases include adenine (A), guanine (G), thymine (T), cytosine (C), and uracil (U). Modified nucleobases include nucleobases found only infrequently or transiently in natural nucleic acids, e.g., hypoxanthine, 6-methyladenine, 5-Me pyrimidines, particularly 5-methylcytosine (also referred to as 5-methyl-2′ deoxycytosine and often referred to in the art as 5-Me-C), 5-hydroxymethylcytosine (HMC), glycosyl HMC and gentobiosyl HMC, as well as synthetic nucleobases, e.g., 2-aminoadenine, 2-(methylamino)adenine, 2-(imidazolylalkyl)adenine, 2-(aminoalklyamino)adenine or other heterosubstituted alkyladenines, 2-thiouracil, 2-thiothymine, 5-bromouracil, 5-hydroxymethyluracil, 8-azaguanine, 7-deazaguanine, N6 (6-aminohexyl)adenine, and 2,6-diaminopurine. Komberg, A., DNA Replication, W. H. Freeman & Co., San Francisco, pp 75-77 (1980); Gebeyehu et al., Nucl. Acids Res. 15:4513 (1997). A “universal” base known in the art, e.g., inosine, can also be included, 5-Me-C substitutions have been shown to increase nucleic acid duplex stability by 0.6-1.2° C. (Sanghvi, Y. S., in Crooke, S. T, and Lebleu. B., eds., Antisense Research and Applications. CRC Press, Boca Raton, 1993, pp. 276-278) and are aspects of base substitutions.

[0372] Modified nucleobases can have other synthetic and natural nucleobases, such as 5-methylcytosine (5-me-C), 5-hydroxymethyl cytosine, xanthine, hypoxanthine, 2-aminoadenine, 6-methyl and other alkyl derivatives of adenine and guanine, 2-propyl and other alkyl derivatives of adenine and guanine, 2-thiouracil, 2-thiothymine and 2-thiocytosine, 5-halouracil and cytosine, 5-propynyl uracil and cytosine, 6-azo uracil, cytosine and thymine, 5-uracil (pseudo-uracil), 4-thiouracil, 8-halo, 8-amino, 8-thiol, 8-thioalkyl, 8-hydroxyl and other 8-substituted adenines and guanines, 5-halo particularly 5-bromo, 5-trifluoromethyl and other 5-substituted uracils and cytosines, 7-methylquanine and 7-methyladenine, 8-azaguanine and 8-azaadenine, 7-deazaguanine and 7-deazaadenine, and 3-deazaguanine and 3-deazaadenine.

[0373] Further, nucleobases can have those disclosed in U.S. Pat. No. 3,687,808, those disclosed in ‘The Concise Encyclopedia of Polymer Science And Engineering’, pages 858-859, Kroschwitz, J. I., ed. John Wiley & Sons, 1990, those disclosed by Englisch et al., Angewandle Chemie, International Edition’, 1991, 30, page 613, and those disclosed by Sanghvi, Y. S., Chapter 15, Antisense Research and Applications’, pages 289-302, Crooke, S. T, and Lebleu. B, ea., CRC Press, 1993. Certain of these nucleobases are particularly useful for increasing the binding affinity of the oligomeric compounds of the disclosure. These include 5-substituted pyrimidines, 6-azapyrimidines and N-2, N-6 and 0-6 substituted purines, having 2-aminopropyladenine, 5-propynyluracil and 5-propynylcytosine. 5-methylcytosine substitutions have been shown to increase nucleic acid duplex stability by 0.6-1.2° C. (Sanghvi, Y. S., Crooke, S. T, and Lebleu, B., eds, ‘Antisense Research and Applications’, CRC Press, Boca Raton, 1993, pp. 276-278) and are aspects of base substitutions, even more particularly when combined with 2′-O-methoxyethyl sugar modifications. Modified nucleobases are described in U.S. Pat. No. 3,687,808, as well as U.S. Pat. Nos. 4,845,205; 5,130,302; 5,134,066; 5,175,273; 5,367,066; 5,432,272; 5,457,187; 5,459,255; 5,484,908; 5,502,177; 5,525,711; 5,552,540; 5,587,469; 5,596,091; 5,614,617; 5,681,941; 5,750,692; 5,763,588; 5,830,653; 6,005,096; and US Patent Application Publication 2003/0158403.

[0374] Thus, the term “modified” refers to a non-natural sugar, phosphate, or base that is incorporated into a guide RNA, an endonuclease, or both a guide RNA and an endonuclease. It is not necessary for all positions in a given oligonucleotide to be uniformly modified, and in fact more than one of the aforementioned modifications can be incorporated in a single oligonucleotide, or even in a single nucleoside within an oligonucleotide.

[0375] The guide RNAs and/or mRNA (or DNA) encoding an endonuclease can be chemically linked to one or more moieties or conjugates that enhance the activity, cellular distribution, or cellular uptake of the oligonucleotide. Such moieties have, but are not limited to, lipid moieties such as a cholesterol moiety [Letsinger et al., Proc. Natl. Acad. Sci. USA, 86: 6553-6556 (1989)]; cholic acid [Manoharan et al., Bioorg. Med. Chem. Let., 4: 1053-1060 (1994)]; a thioether, e.g., hexyl-S-tritylthiol [Manoharan et al, Ann. N. Y. Acad. Sci., 660: 306-309 (1992) and Manoharan et al., Bioorg. Med. Chem. Let., 3: 2765-2770 (1993)]; a thiocholesterol [Oberhauser et al., Nucl. Acids Res., 20: 533-538 (1992)]; an aliphatic chain, e.g., dodecandiol or undecyl residues [Kabanov et al., FEBS Lett., 259: 327-330 (1990) and Svinarchuk et al., Biochimie, 75: 49-54 (1993)]; a phospholipid, e.g., di-hexadecyl-rac-glycerol or triethylammonium 1,2-di-O-hexadecyl-rac-glycero-3-H-phosphonate [Manoharan et al., Tetrahedron Lett., 36: 3651-3654 (1995) and Shea et al., Nucl. Acids Res., 18: 3777-3783 (1990)]; a polyamine or a polyethylene glycol chain [Mancharan et al., Nucleosides & Nucleotides, 14: 969-973 (1995)]; adamantane acetic acid [Manoharan et al., Tetrahedron Lett., 36: 3651-3654 (1995)]; a palmityl moiety [(Mishra et al., Biochim. Biophys. Acta, 1264: 229-237 (1995)]; or an octadecylamine or hexylamino-carbonyl-t oxycholesterol moiety [Crooke et al., J. Pharmacol. Exp. Ther., 277: 923-937 (1996)]. See also U.S. Pat. Nos. 4,828,979; 4,948,882; 5,218,105; 5,525,465; 5,541,313; 5,545,730; 5,552,538; 5,578,717, 5,580,731; 5,580,731; 5,591,584; 5,109,124; 5,118,802; 5,138,045; 5,414,077; 5,486,603; 5,512,439; 5,578,718; 5,608,046; 4,587,044; 4,605,735; 4,667,025; 4,762,779; 4,789,737; 4,824,941; 4,835,263; 4,876,335; 4,904,582; 4,958,013; 5,082,830; 5,112,963; 5,214,136; 5,082,830; 5,112,963; 5,214,136; 5,245,022; 5,254,469; 5,258,506; 5,262,536; 5,272,250; 5,292,873; 5,317,098; 5,371,241, 5,391,723; 5,416,203, 5,451,463; 5,510,475; 5,512,667; 5,514,785; 5,565,552; 5,567,810; 5,574,142; 5,585,481; 5,587,371; 5,595,726; 5,597,696; 5,599,923; 5,599,928 and 5,688,941; the contents of each of which are herein incorporated by reference in their entirety.

[0376] Sugars and other moieties can be used to target proteins and complexes having nucleotides, such as cationic polysomes and liposomes, to particular sites. For example, hepatic cell directed transfer can be mediated via asialoglycoprotein receptors (ASGPRs); see, e.g., Hu, et al., Protein Pept Lett. 21(10); 1025-30 (2014). Other systems known in the art and regularly developed can be used to target biomolecules of use in the present case and/or complexes thereof to particular target cells of interest.

[0377] These targeting moieties or conjugates can include conjugate groups covalently bound to functional groups, such as primary or secondary hydroxyl groups. Conjugate groups of the disclosure include intercalators, reporter molecules, polyamines, polyamides, polyethylene glycols, polyethers, groups that enhance the pharmacodynamic properties of oligomers, and groups that enhance the pharmacokinetic properties of oligomers. Typical conjugate groups include cholesterols, lipids, phospholipids, biotin, phenazine, folate, phenanthridine, anthraquinone, acridine, fluoresceins, rhodamines, coumarins, and dyes. Groups that enhance the pharmacodynamic properties, in the context of this disclosure, include groups that improve uptake, enhance resistance to degradation, and/or strengthen sequence-specific hybridization with the target nucleic acid. Groups that enhance the pharmacokinetic properties, in the context of certain embodiments of the present disclosure, include groups that improve uptake, distribution, metabolism or excretion of the compounds of the present disclosure. Representative conjugate groups are disclosed in International Patent Application No. PCT/US92/09196, filed Oct. 23, 1992 (published as WO1993007883), and U.S. Pat. No. 6,287,860, the contents of each of which are herein incorporated by reference in their entirety. Conjugate moieties include, but are not limited to, lipid moieties such as a cholesterol moiety, cholic acid, a thioether, e.g., hexyl-5-tritylthiol, a thiocholesterol, an aliphatic chain, e.g., dodecandiol or undecyl residues, a phospholipid, e.g., di-hexadecyl-rac-glycerol or triethylammonium 1,2-di-O-hexadecyl-rac-glycero-3-H-phosphonate, a polyamine or a polyethylene glycol chain, or adamantane acetic acid, a palmityl moiety, or an octadecylamine or hexylamino-carbonyl-oxy cholesterol moiety. See, e.g., U.S. Pat. Nos. 4,828,979; 4,948,882; 5,218,105; 5,525,465; 5,541,313; 5,545,730; 5,552,538; 5,578,717, 5,580,731; 5,580,731; 5,591,584; 5,109,124; 5,118,802; 5,138,045; 5,414,077; 5,486,603; 5,512,439; 5,578,718; 5,608,046; 4,587,044; 4,605,735; 4,667,025; 4,762,779; 4,789,737; 4,824,941; 4,835,263; 4,876,335; 4,904,582; 4,958,013; 5,082,830; 5,112,963; 5,214,136; 5,082,830; 5,112,963; 5,214,136; 5,245,022; 5,254,469; 5,258,506; 5,262,536; 5,272,250; 5,292,873; 5,317,098; 5,371,241, 5,391,723; 5,416,203, 5,451,463; 5,510,475; 5,512,667; 5,514,785; 5,565,552; 5,567,810; 5,574,142; 5,585,481; 5,587,371; 5,595,726; 5,597,696; 5,599,923; 5,599,928 and 5,688,941, the contents of each of which are herein incorporated by reference in their entirety.

[0378] Longer polynucleotides that are less amenable to chemical synthesis and are typically produced by enzymatic synthesis can also be modified by various means. Such modifications can include, for example, the introduction of certain nucleotide analogs, the incorporation of particular sequences or other moieties at the 5′ or 3′ ends of molecules, and other modifications. By way of illustration, the mRNA encoding Cas9 is approximately 4 kb in length and can be synthesized by in vitro transcription. Modifications to the mRNA can be applied to, e.g., increase its translation or stability (such as by increasing its resistance to degradation with a cell), or to reduce the tendency of the RNA to elicit an innate immune response that is often observed in cells following introduction of exogenous RNAs, particularly longer RNAs such as that encoding Cas9.

[0379] Numerous such modifications have been described in the art, such as polyA tails, 5′ cap analogs (e.g., Anti Reverse Cap Analog (ARCA) or m7G(5′)ppp(5′)G (mCAP)), modified 5′ or 3′ untranslated regions (UTRs), use of modified bases (such as Pseudo-UTP, 2-Thio-UTP, 5-Methylcytidine-5′-Triphosphate (5-Methyl-CTP) or N6-Methyl-ATP), or treatment with phosphatase to remove 5′ terminal phosphates. These and other modifications are known in the art, and new modifications of RNAs are regularly being developed.

[0380] There are numerous commercial suppliers of modified RNAs, including for example, TriLink Biotech. AxoLabs, Bio-Synthesis Inc., Dharmacon and many others. As described by TriLink, for example, 5-Methyl-CTP can be used to impart desirable characteristics, such as increased nuclease stability, increased translation or reduced interaction of innate immune receptors with in vitro transcribed RNA. 5-Methylcytidine-5′-Triphosphate (5-Methyl-CTP), N6-Methyl-ATP, as well as Pseudo-UTP and 2-Thio-UTP, have also been shown to reduce innate immune stimulation in culture and in vivo while enhancing translation, as illustrated in publications by Kormann et al, and Warren et al. referred to below.

[0381] It has been shown that chemically modified mRNA delivered in vivo can be used to achieve improved therapeutic effects; see, e.g., Kormann et al., Nature Biotechnology 29, 154-157 (2011). Such modifications can be used, for example, to increase the stability of the RNA molecule and/or reduce its immunogenicity. Using chemical modifications such as Pseudo-U, N6-Methyl-A, 2-Thio-U and 5-Methyl-C, it was found that substituting just one quarter of the uridine and cytidine residues with 2-Thio-U and 5-Methyl-C respectively resulted in a significant decrease in toll-like receptor (TLR) mediated recognition of the mRNA in mice. By reducing the activation of the innate immune system, these modifications can be used to effectively increase the stability and longevity of the mRNA in vivo; see, e.g., Kormann et al., supra.

[0382] It has also been shown that repeated administration of synthetic messenger RNAs incorporating modifications designed to bypass innate anti-viral responses can reprogram differentiated human cells to pluripotency. See, e.g., Warren, et al., Cell Stem Cell, 7(5):618-30 (2010). Such modified mRNAs that act as primary reprogramming proteins can be an efficient means of reprogramming multiple human cell types. Such cells are referred to as induced pluripotency stem cells (iPSCs), and it was found that enzymatically synthesized RNA incorporating 5-Methyl-CTP, Pseudo-UTP and an Anti Reverse Cap Analog (ARCA) could be used to effectively evade the cell's antiviral response; see, e.g., Warren et al., supra.

[0383] Other modifications of polynucleotides described in the art include, for example, the use of polyA tails, the addition of 5′ cap analogs (such as m7G(5′)ppp(5′)G (mCAP)), modifications of 5′ or 3′ untranslated regions (UTRs), or treatment with phosphatase to remove 5′ terminal phosphates—and new approaches are regularly being developed.

[0384] A number of compositions and techniques applicable to the generation of modified RNAs for use herein have been developed in connection with the modification of RNA interference (RNAi), including small-interfering RNAs (siRNAs). siRNAs present particular challenges in vivo because their effects on gene silencing via mRNA interference are generally transient, which can require repeat administration. In addition, siRNAs are double-stranded RNAs (dsRNA) and mammalian cells have immune responses that have evolved to detect and neutralize dsRNA, which is often a by-product of viral infection. Thus, there are mammalian enzymes such as PKR (dsRNA-responsive kinase), and potentially retinoic acid-inducible gene I (RIG-I), that can mediate cellular responses to dsRNA, as well as Toll-like receptors (such as TLR3, TLR7 and TLR8) that can trigger the induction of cytokines in response to such molecules; see, e.g., the reviews by Angart et al., Pharmaceuticals (Basel) 6(4): 440-468 (2013): Kanasty et al., Molecular Therapy 20(3): 513-524 (2012); Burnett et al., Biotechnol J. 6(9): 1130-46 (2011); Judge and MacLachlan, Hum Gene Ther 19(2): 111-24 (2008); and references cited therein.

[0385] A large variety of modifications have been developed and applied to enhance RNA stability, reduce innate immune responses, and/or achieve other benefits that can be useful in connection with the introduction of polynucleotides into human cells, as described herein; see, e.g., the reviews by Whitehead K A et al., Annual Review of Chemical and Biomolecular Engineering, 2: 77-96 (2011); Gaglione and Messere, Mini Rev Med Chem, 10(7):578-95 (2010); Chemolovskaya et al, Curr Opin Mol Ther., 12(2): 158-67 (2010); Deleavey et al., Curr Protoc Nucleic Acid Chem Chapter 16: Unit 16.3 (2009); Behlke, Oligonucleotides 18(4):305-19 (2008); Fucini et al., Nucleic Acid Ther 22(3): 205-210 (2012); Bremsen et al., Front Genet 3:154 (2012).

[0386] As noted above, there are a number of commercial suppliers of modified RNAs, many of which have specialized in modifications designed to improve the effectiveness of siRNAs. A variety of approaches are offered based on various findings reported in the literature. For example, Dharmacon notes that replacement of a non-bridging oxygen with sulfur (phosphorothioate, PS) has been extensively used to improve nuclease resistance of siRNAs, as reported by Kole, Nature Reviews Drug Discovery 11:125-140 (2012). Modifications of the 2′-position of the ribose have been reported to improve nuclease resistance of the internucleotide phosphate bond while increasing duplex stability (Tm), which has also been shown to provide protection from immune activation. A combination of moderate PS backbone modifications with small, well-tolerated 2′-substitutions (2′-O-Methyl, 2′-Fluoro, 2′-Hydro) have been associated with highly stable siRNAs for applications in vivo, as reported by Soutschek et al. Nature 432:173-178 (2004); and 2′-O-Methyl modifications have been reported to be effective in improving stability as reported by Volkov, Oligonucleotides 19:191-202 (2009). With respect to decreasing the induction of innate immune responses, modifying specific sequences with 2′-O-Methyl, 2′-Fluoro, 2′-Hydro have been reported to reduce TLR7/TLR8 interaction while generally preserving silencing activity; see, e.g., Judge et al., Mol. Ther. 13:494-505 (2006); and Cekaite et al., J. Mol. Biol. 365:90-108 (2007). Additional modifications, such as 2-thiouracil, pseudouracil, 5-methylcytosine, 5-methyluracil, and N6-methyladenosine have also been shown to minimize the immune effects mediated by TLR3, TLR7, and TLR8; see, e.g., Kariko, K et al., Immunity 23:165-175 (2005).

[0387] As is also known in the art, and commercially available, a number of conjugates can be applied to polynucleotides, such as RNAs, for use herein that can enhance their delivery and/or uptake by cells, including for example, cholesterol, tocopherol and folic acid, lipids, peptides, polymers, linkers and aptamers; see, e.g., the review by Winkler, Ther. Deliv. 4:791-809 (2013), and references cited therein.

### Codon-Optimization

[0388] A polynucleotide encoding a site-directed polypeptide can be codon-optimized according to methods standard in the art for expression in the cell containing the target DNA of interest. For example, if the intended target nucleic acid is in a human cell, a human codon-optimized polynucleotide encoding Cas9 is contemplated for use for producing the Cas9 polypeptide.

### Complexes of a Genome-Targeting Nucleic Acid and a Site-Directed Polypeptide

[0389] A genome-targeting nucleic acid interacts with a site-directed polypeptide (e.g., a nucleic acid-guided nuclease such as Cas9), thereby forming a complex. The genome-targeting nucleic acid guides the site-directed polypeptide to a target nucleic acid.

### Ribonucleoprotein Complexes (RNPs)

[0390] The site-directed polypeptide and genome-targeting nucleic acid can each be administered separately to a cell or a patient. On the other hand, the site-directed polypeptide can be pre-complexed with one or more guide RNAs, or one or more crRNA together with a tracrRNA. The pre-complexed material can then be administered to a cell or a patient. Such pre-complexed material is known as a ribonucleoprotein particle (RNP).

### Nucleic Acids Encoding System Components

[0391] The present disclosure provides a nucleic acid having a nucleotide sequence encoding a genome-targeting nucleic acid of the disclosure, a site-directed polypeptide of the disclosure, and/or any nucleic acid or proteinaceous molecule necessary to carry out the aspects of the methods of the disclosure.

### Specific Methods and Compositions

[0392] Accordingly, the present disclosure relates in particular to the following non-limiting methods according to the disclosure: In a first method, Method 1, the present disclosure provides a method for editing a Wiskott-Aldrich syndrome gene (WAS gene) in a human cell by genome editing, the method having the step of: introducing into the human cell one or more deoxyribonucleic acid (DNA) endonucleases to effect one or more single-strand breaks (SSBs) or double-strand breaks (DSBs) at, within, or near the WAS gene or other DNA sequences that encode regulatory elements of the WAS gene that results in a permanent insertion, correction, or modulation of expression or function of one or more mutations at, within, or near or affecting the expression or function of the WAS gene and results in restoration of WAS protein activity.

[0393] In another method, Method 2, the present disclosure provides an ex vivo method for treating a patient with Wiskott-Aldrich Syndrome (WAS), the method having the steps of: creating a patient specific induced pluripotent stem cell (iPSC); editing at, within, or near a Wiskott-Aldrich syndrome gene (WAS gene) or other DNA sequences that encode regulatory elements of the WAS gene of the iPSC; differentiating the genome-edited iPSC into a hepatocyte; and implanting the hepatocyte into the patient.

[0394] In another method, Method 3, the present disclosure provides an ex vivo method for treating a patient with Wiskott-Aldrich Syndrome (WAS) as provided in Method 2 wherein the creating step has: a) isolating a somatic cell from the patient; and b) introducing a set of pluripotency-associated genes into the somatic cell to induce the somatic cell to become a pluripotent stem cell.

[0395] In another method, Method 4, the present disclosure provides an ex vivo method for treating a patient with Wiskott-Aldrich Syndrome (WAS) as provided in Method 3, wherein the somatic cell is a fibroblast.

[0396] In another method, Method 5, the present disclosure provides an ex vivo method for treating a patient with Wiskott-Aldrich Syndrome (WAS) as provided in Method 3, wherein the set of pluripotency-associated genes is one or more of the genes selected from the group consisting of OCT4, SOX2, KLF4, Lin28, NANOG and cMYC.

[0397] In another method, Method 6, the present disclosure provides an ex vivo method for treating a patient with Wiskott-Aldrich Syndrome (WAS) as provided in any one of Methods 2-5, wherein the editing step has introducing into the iPSC one or more deoxyribonucleic acid (DNA) endonucleases to effect one or more single-strand breaks (SSBs) or double-strand breaks (DSBs) at, within, or near the WAS gene or other DNA sequences that encode regulatory elements of the WAS gene that results in a permanent insertion, correction, or modulation of expression or function of one or more mutations at, within, or near or affecting the expression or function of the WAS gene and results in restoration of WAS protein activity.

[0398] In another method, Method 7, the present disclosure provides an ex vivo method for treating a patient with Wiskott-Aldrich Syndrome (WAS) as provided in any one of Methods 2-6, wherein the differentiating step has one or more of the following to differentiate the genome-edited iPSC into a hepatocyte, contacting the genome-edited iPSC with one or more of activin, B27 supplement, FGF4, HGF, BMP2, BMP4, Oncostatin M, Dexametason.

[0399] In another method, Method 8, the present disclosure provides an ex vivo method for treating a patient with Wiskott-Aldrich Syndrome (WAS) as provided in any one of Methods 2-7, wherein the implanting step has implanting the hepatocyte into the patient by local injection, systemic infusion, or combinations thereof.

[0400] In another method, Method 9, the present disclosure provides an ex vivo method for treating a patient with Wiskott-Aldrich Syndrome (WAS), the method having the steps of: performing a biopsy of the patient's liver; isolating a liver specific progenitor cell or primary hepatocyte; editing at, within, or near a Wiskott-Aldrich syndrome gene (WAS gene) or other DNA sequences that encode regulatory elements of the WAS gene of the progenitor cell or primary hepatocyte; and implanting the progenitor cell or primary hepatocyte into the patient.

[0401] In another method, Method 10, the present disclosure provides an ex vivo method for treating a patient with Wiskott-Aldrich Syndrome (WAS) as provided in Method 9, wherein the isolating step has: perfusion of fresh liver tissues with digestion enzymes, cell differential centrifugation, cell culturing, or combinations thereof.

[0402] In another method, Method 11, the present disclosure provides an ex vivo method for treating a patient with Wiskott-Aldrich Syndrome (WAS) as provided in Methods 9 or 10, wherein the editing step has introducing into the progenitor cell or primary hepatocyte one or more deoxyribonucleic acid (DNA) endonucleases to effect one or more single-strand breaks (SSBs) or double-strand breaks (DSBs) at, within, or near the WAS gene or other DNA sequences that encode regulatory elements of the WAS gene that results in a permanent insertion, correction, or modulation of expression or function of one or more mutations at, within, or near or affecting the expression or function of the WAS gene and restoration of WAS protein activity.

[0403] In another method, Method 12, the present disclosure provides an ex vivo method for treating a patient with Wiskott-Aldrich Syndrome (WAS) as provided in any one of Methods 9-11, wherein the implanting the progenitor cell or primary hepatocyte into the patient by local injection, systemic infusion, or combinations thereof.

[0404] In another method, Method 13, the present disclosure provides an ex vivo method for treating a patient with Wiskott-Aldrich Syndrome (WAS), the method having the steps of: isolating a mesenchymal stem cell from the patient; editing at, within, or near a Wiskott-Aldrich syndrome gene (WAS gene) or other DNA sequences that encode regulatory elements of the WAS gene of the mesenchymal stem cell from the patient; differentiating the genome-edited mesenchymal stem cell into a heptocyte; and implanting the hepatocyte into the patient.

[0405] In another method, Method 14, the present disclosure provides an ex vivo method for treating a patient with Wiskott-Aldrich Syndrome (WAS) as provided in Method 13, wherein the mesenchymal stem cell is isolated from the patient's bone marrow by performing a biopsy of the patient's bone marrow or the mesenchymal stem cell is isolated from peripheral blood.

[0406] In another method, Method 15, the present disclosure provides an ex vivo method for treating a patient with Wiskott-Aldrich Syndrome (WAS) as provided in Method 13, wherein the isolating step has: aspiration of bone marrow and isolation of mesenchymal cells by density centrifugation using Percoll™.

[0407] In another method, Method 16, the present disclosure provides an ex vivo method for treating a patient with Wiskott-Aldrich Syndrome (WAS) as provided in any one of Methods 13-15, wherein the editing step has introducing into the mesenchymal stem cell one or more deoxyribonucleic acid (DNA) endonucleases to effect one or more single-strand breaks (SSBs) or double-strand breaks (DSBs) at, within, or near the WAS gene or other DNA sequences that encode regulatory elements of the WAS gene that results in a permanent insertion, correction, or modulation of expression or function of one or more mutations at, within, or near or affecting the expression or function of the WAS gene and restoration of WAS protein activity.

[0408] In another method, Method 17, the present disclosure provides an ex vivo method for treating a patient with Wiskott-Aldrich Syndrome (WAS) as provided in any one of Methods 13-16, wherein the differentiating step has one or more of the following to differentiate the genome-edited stem cell into a hepatocyte: contacting the genome-edited stem cell with one or more of insulin, transferrin, FGF4, HGF, or bile acids.

[0409] In another method, Method 18, the present disclosure provides an ex vivo method for treating a patient with Wiskott-Aldrich Syndrome (WAS) as provided in any one of Methods 13-17, wherein the implanting step has implanting the hepatocyte into the patient by local injection, systemic infusion, or combinations thereof.

[0410] In another method, Method 19, the present disclosure provides an in vivo method for treating a patient with Wiskott-Aldrich Syndrome (WAS), the method having the step of editing a Wiskott-Aldrich syndrome gene (WAS gene) in a cell of the patient.

[0411] In another method, Method 20, the present disclosure provides an in vivo method for treating a patient with Wiskott-Aldrich Syndrome (WAS) as provided in Method 19, wherein the editing step has introducing into the cell one or more deoxyribonucleic acid (DNA) endonucleases to effect one or more single-strand breaks (SSBs) or double-strand breaks (DSBs) at, within, or near the WAS gene or other DNA sequences that encode regulatory elements of the WAS gene that results in a permanent insertion, correction, or modulation of expression or function of one or more mutations at, within, or near or affecting the expression or function of the WAS gene and restoration of WAS protein activity.

[0412] In another method, Method 21, the present disclosure provides a method according to any one of Methods 1, 6, 11, 16, or 20, wherein the one or more DNA endonucleases is a Cas1, Cas1B, Cas2, Cas3, Cas4, Cas5, Cas6, Cas7, Cas8, Cas9 (also known as Csn1 and Csx12), Cas100, Csy1, Csy2, Csy3, Cse1, Cse2, Csc1, Csc2, Csa5, Csn2, Csm2, Csm3, Csm4, Csm5, Csm6, Cmr1, Cmr3, Cmr4, Cmr5, Cmr6, Csb1, Csb2, Csb3, Csx17, Csx14, Csx10, Csx16, CsaX, Csx3, Csx1, Csx15, Csf1, Csf2, Csf3, Csf4, or Cpf1 endonuclease; or a homolog, recombination of the naturally occurring molecule, codon-optimized, or modified version thereof, and combinations thereof.

[0413] In another method, Method 22, the present disclosure provides a method as provided in Method 21, wherein the method has introducing into the cell one or more polynucleotides encoding the one or more DNA endonucleases.

[0414] In another method, Method 23, the present disclosure provides a method as provided in Method 21, wherein the method has introducing into the cell one or more ribonucleic acids (RNAs) encoding the one or more DNA endonucleases.

[0415] In another method, Method 24, the present disclosure provides a method as provided in Methods 22 or 23, wherein the one or more polynucleotides or one or more RNAs is one or more modified polynucleotides or one or more modified RNAs.

[0416] In another method, Method 25, the present disclosure provides a method as provided in Method 21, wherein the DNA endonuclease is a protein or polypeptide.

[0417] In another method, Method 26, the present disclosure provides a method as provided in any one of Methods 1-25, wherein the method further has introducing into the cell one or more guide ribonucleic acids (gRNAs).

[0418] In another method, Method 27, the present disclosure provides a method as provided in Method 26, wherein the one or more gRNAs are single-molecule guide RNA (sgRNAs).

[0419] In another method, Method 28, the present disclosure provides a method as provided in Methods 26 or 27, wherein the one or more gRNAs or one or more sgRNAs is one or more modified gRNAs or one or more modified sgRNAs.

[0420] In another method, Method 29, the present disclosure provides a method as provided in any one of Methods 26-28, wherein the one or more DNA endonucleases is pre-complexed with one or more gRNAs or one or more sgRNAs.

[0421] In another method, Method 30, the present disclosure provides a method as provided in any one of Methods 1-29, wherein the method further has introducing into the cell a polynucleotide donor template having at least a portion of the wild-type WAS gene or cDNA.

[0422] In another method, Method 31, the present disclosure provides a method as provided in Method 30, wherein the at least a portion of the wild-type WAS gene or cDNA can be any of the exons or introns as defined herein. Such portions may include more than one intron or exon as well as sequence regions bridging exons and introns, e.g., intron:exon junctions, intronic regions, fragments or combinations thereof, or the entire WAS gene or cDNA.

[0423] In another method, Method 32, the present disclosure provides a method as provided in any one of Methods 30 or 31, wherein the donor template is either a single or double stranded polynucleotide.

[0424] In another method, Method 34, the present disclosure provides a method as provided in any one of Methods 1, 6, 11, 16, or 20, wherein the method further has introducing into the cell one guide ribonucleic acid (gRNA) and a polynucleotide donor template having at least a portion of the wild-type WAS gene, and wherein the one or more DNA endonucleases is one or more Cas9 or Cpf1 endonucleases that effect one single-strand break (SSB) or double-strand break (DSB) at a locus at, within, or near the WAS gene or other DNA sequences that encode regulatory elements of the WAS gene that facilitates insertion of a new sequence from the polynucleotide donor template into the chromosomal DNA at the locus that results in a permanent insertion or correction of a part of the chromosomal DNA of the WAS gene or other DNA sequences that encode regulatory elements of the WAS gene proximal to the locus, and wherein the gRNA has a spacer sequence that is complementary to a segment of the locus.

[0425] In another method, Method 35, the present disclosure provides a method as provided in Method 34, wherein proximal means nucleotides both upstream and downstream of the locus.

[0426] In another method, Method 36, the present disclosure provides a method as provided in any one of Methods 1, 6, 11, 16 or 20, wherein the method further has introducing into the cell two guide ribonucleic acid (gRNAs) and a polynucleotide donor template having at least a portion of the wild-type WAS gene, and wherein the one or more DNA endonucleases is one or more Cas9 or Cpf1 endonucleases that effect a pair of single-strand breaks (SSBs) or double-strand breaks (DSBs), the first at a 5′ locus and the second at a 3′ locus, at, within, or near the WAS gene or other DNA sequences that encode regulatory elements of the WAS gene that facilitates insertion of a new sequence from the polynucleotide donor template into the chromosomal DNA between the 5′ locus and the 3′ locus that results in a permanent insertion or correction of the chromosomal DNA between the 5′ locus and the 3′ locus at, within, or near the WAS gene or other DNA sequences that encode regulatory elements of the WAS gene, and wherein the first guide RNA has a spacer sequence that is complementary to a segment of the 5′ locus and the second guide RNA has a spacer sequence that is complementary to a segment of the 3′ locus.

[0427] In another method, Method 37, the present disclosure provides a method as provided in any one of Methods 34-36, wherein the one or two gRNAs are one or two single-molecule guide RNA (sgRNAs).

[0428] In another method, Method 38, the present disclosure provides a method as provided in any one of Methods 34-37, wherein the one or two gRNAs or one or two sgRNAs is one or two modified gRNAs or one or two modified sgRNAs.

[0429] In another method, Method 39, the present disclosure provides a method as provided in any one of Methods 34-38, wherein the one or more DNA endonucleases is pre-complexed with one or two gRNAs or one or two sgRNAs.

[0430] In another method, Method 40, the present disclosure provides a method as provided in any one of Methods 33-38, wherein the at least a portion of the wild-type WAS gene or cDNA can be any of the exons or introns as defined herein. Such portions may include more than one intron or exon as well as sequence regions bridging exons and introns, e.g., intron:exon junctions, intronic regions, fragments or combinations thereof, or the entire WAS gene or cDNA.

[0431] In another method, Method 41, the present disclosure provides a method as provided in any one of Methods 34-40, wherein the donor template is either a single or double stranded polynucleotide.

[0432] In another method, Method 43, the present disclosure provides a method as provided in any one of Methods 34-42, wherein the SSB, DSB, or 5′ DSB and 3′ DSB are in any intron, exon or junction thereof of the WAS gene.

[0433] In another method, Method 44, the present disclosure provide a method as provided in any one of Methods 1, 6, 11, 16, 20, 26-29, or 37-39, wherein the gRNA or sgRNA is directed to one or more SNPs.

[0434] In another method, Method 45, the present disclosure provides a method as provided in any one of Methods 1, 6, 11, 16, or 20-44, wherein the insertion or correction is by homology directed repair (HDR).

[0435] In another method, Method 46, the present disclosure provides a method as provided in any one of Methods 1, 6, 11, 16, or 20-45, wherein the Cas9 or Cpf1 mRNA, gRNA, and donor template are either each formulated into separate lipid nanoparticles or all co-formulated into a lipid nanoparticle.

[0436] In another method, Method 47, the present disclosure provides a method as provided in any one of Methods 1, 6, 11, 16, or 20-46, wherein the Cas9 or Cpf1 mRNA is formulated into a lipid nanoparticle, and both the gRNA and donor template are delivered to the cell by an adeno-associated virus (AAV) vector.

[0437] In another method, Method 48, the present disclosure provides a method as provided in any one of Methods 1, 6, 11, 16, or 20-47, wherein the Cas9 or Cpf1 mRNA is formulated into a lipid nanoparticle, and the gRNA is delivered to the cell by electroporation and donor template is delivered to the cell by an adeno-associated virus (AAV) vector.

[0438] In another method, Method 50, the present disclosure provides a method as provided in any one of Methods 1, 6, 11, 16, or 20, wherein the restoration of WAS protein activity is compared to wild-type or normal WAS protein activity.

[0439] In a first composition, Composition 1, the present disclosure provides one or more guide ribonucleic acids (gRNAs) for editing a WAS gene in a cell from a patient with Wiskott-Aldrich Syndrome (WAS), the one or more gRNAs having a spacer sequence.

[0440] In another composition, Composition 2, the present disclosure provides the one or more gRNAs of Composition 1, wherein the one or more gRNAs are one or more single-molecule guide RNAs (sgRNAs).

[0441] In another composition, Composition 3, the present disclosure provides the one or more gRNAs or sgRNAs of Compositions 1 or 2, wherein the one or more gRNAs or one or more sgRNAs is one or more modified gRNAs or one or more modified sgRNAs.

[0442] The nucleic acid encoding a genome-targeting nucleic acid of the disclosure, a site-directed polypeptide of the disclosure, and/or any nucleic acid or proteinaceous molecule necessary to carry out the aspects of the methods of the disclosure can have a vector (e.g., a recombinant expression vector).

[0443] The term “vector” refers to a nucleic acid molecule capable of transporting another nucleic acid to which it has been linked. One type of vector is a “plasmid”, which refers to a circular double-stranded DNA loop into which additional nucleic acid segments can be ligated.

[0444] Another type of vector is a viral vector, wherein additional nucleic acid segments can be ligated into the viral genome. Certain vectors are capable of autonomous replication in a host cell into which they are introduced (e.g., bacterial vectors having a bacterial origin of replication and episomal mammalian vectors). Other vectors (e.g., non-episomal mammalian vectors) are integrated into the genome of a host cell upon introduction into the host cell, and thereby are replicated along with the host genome.

[0445] In some examples, vectors can be capable of directing the expression of nucleic acids to which they are operatively linked. Such vectors are referred to herein as “recombinant expression vectors”, or more simply “expression vectors”, which serve equivalent functions.

[0446] The term “operably linked” means that the nucleotide sequence of interest is linked to regulatory sequence(s) in a manner that allows for expression of the nucleotide sequence. The term “regulatory sequence” is intended to include, for example, promoters, enhancers and other expression control elements (e.g., polyadenylation signals). Such regulatory sequences are well known in the art and are described, for example, in Goeddel; Gene Expression Technology: Methods in Enzymology 185, Academic Press, San Diego, Calif. (1990). Regulatory sequences include those that direct constitutive expression of a nucleotide sequence in many types of host cells, and those that direct expression of the nucleotide sequence only in certain host cells (e.g., tissue-specific regulatory sequences). It will be appreciated by those skilled in the art that the design of the expression vector can depend on such factors as the choice of the target cell, the level of expression desired, and the like.

[0447] Expression vectors contemplated include, but are not limited to, viral vectors based on vaccinia virus, poliovirus, adenovirus, adeno-associated virus, SV40, herpes simplex virus, human immunodeficiency virus, retrovirus (e.g., Murine Leukemia Virus, spleen necrosis virus, and vectors derived from retroviruses such as Rous Sarcoma Virus, Harvey Sarcoma Virus, avian leukosis virus, a lentivirus, human immunodeficiency virus, myeloproliferative sarcoma virus, and mammary tumor virus) and other recombinant vectors. Other vectors contemplated for eukaryotic target cells include, but are not limited to, the vectors pXT1, pSG5, pSVK3, pBPV, pMSG, and pSVLSV40 (Pharmacia). Additional vectors contemplated for eukaryotic target cells include, but are not limited to, the vectors pCTx-1, pCTx-2, and pCTx-3, which are described in FIGS. 1A to 1C. Other vectors can be used so long as they are compatible with the host cell.

[0448] In some examples, a vector can have one or more transcription and/or translation control elements. Depending on the host/vector system utilized, any of a number of suitable transcription and translation control elements, including constitutive and inducible promoters, transcription enhancer elements, transcription terminators, etc, can be used in the expression vector. The vector can be a self-inactivating vector that either inactivates the viral sequences or the components of the CRISPR machinery or other elements.

[0449] Non-limiting examples of suitable eukaryotic promoters (i.e., promoters functional in a eukaryotic cell) include those from cytomegalovirus (CMV) immediate early, herpes simplex virus (HSV) thymidine kinase, early and late SV40, long terminal repeats (LTRs) from retrovirus, human elongation factor-1 promoter (EF1), a hybrid construct having the cytomegalovirus (CMV) enhancer fused to the chicken beta-actin promoter (CAG), murine stem cell virus promoter (MSCV), phosphoglycerate kinase-1 locus promoter (PGK), and mouse metallothionein-I.

[0450] For expressing small RNAs, including guide RNAs used in connection with Cas endonuclease, various promoters such as RNA polymerase 111 promoters, including for example U6 and H1, can be advantageous. Descriptions of and parameters for enhancing the use of such promoters are known in art, and additional information and approaches are regularly being described; see, e.g., Ma, H, et, al., Molecular Therapy—Nucleic Acids 3, e161 (2014) doi:10.1038/mtna.2014.12.

[0451] The expression vector can also contain a ribosome binding site for translation initiation and a transcription terminator. The expression vector can also have appropriate sequences for amplifying expression. The expression vector can also include nucleotide sequences encoding non-native tags (e.g., histidine tag, hemagglutinin tag, green fluorescent protein, etc.) that are fused to the site-directed polypeptide, thus resulting in a fusion protein.

[0452] A promoter can be an inducible promoter (e.g., a heat shock promoter, tetracycline-regulated promoter, steroid-regulated promoter, metal-regulated promoter, estrogen receptor-regulated promoter, etc.). The promoter can be a constitutive promoter (e.g., CMV promoter, UBC promoter). In some cases, the promoter can be a spatially restricted and/or temporally restricted promoter (e.g., a tissue specific promoter, a cell type specific promoter, etc.).

[0453] The nucleic acid encoding a genome-targeting nucleic acid of the disclosure and/or a site-directed polypeptide can be packaged into or on the surface of delivery vehicles for delivery to cells. Delivery vehicles contemplated include, but are not limited to, nanospheres, liposomes, quantum dots, nanoparticles, polyethylene glycol particles, hydrogels, and micelles. As described in the art, a variety of targeting moieties can be used to enhance the preferential interaction of such vehicles with desired cell types or locations.

[0454] Introduction of the complexes, polypeptides, and nucleic acids of the disclosure into cells can occur by viral or bacteriophage infection, transfection, conjugation, protoplast fusion, lipofection, electroporation, nucleofection, calcium phosphate precipitation, polyethyleneimine (PEI)-mediated transfection, DEAE-dextran mediated transfection, liposome-mediated transfection, particle gun technology, calcium phosphate precipitation, direct micro-injection, nanoparticle-mediated nucleic acid delivery, and the like.

### III. Formulations and Delivery

### Pharmaceutically Acceptable Carriers

[0455] The ex vivo methods of administering progenitor cells to a subject contemplated herein involve the use of therapeutic compositions having progenitor cells.

[0456] Therapeutic compositions can contain a physiologically tolerable carrier together with the cell composition, and optionally at least one additional bioactive agent as described herein, dissolved or dispersed therein as an active ingredient. In some cases, the therapeutic composition is not substantially immunogenic when administered to a mammal or human patient for therapeutic purposes, unless so desired.

[0457] In general, the progenitor cells described herein can be administered as a suspension with a pharmaceutically acceptable carrier. One of skill in the art will recognize that a pharmaceutically acceptable carrier to be used in a cell composition will not include buffers, compounds, cryopreservation agents, preservatives, or other agents in amounts that substantially interfere with the viability of the cells to be delivered to the subject. A formulation having cells can include e.g., osmotic buffers that permit cell membrane integrity to be maintained, and optionally, nutrients to maintain cell viability or enhance engraftment upon administration. Such formulations and suspensions are known to those of skill in the art and/or can be adapted for use with the progenitor cells, as described herein, using routine experimentation.

[0458] A cell composition can also be emulsified or presented as a liposome composition, provided that the emulsification procedure does not adversely affect cell viability. The cells and any other active ingredient can be mixed with excipients that are pharmaceutically acceptable and compatible with the active ingredient, and in amounts suitable for use in the therapeutic methods described herein.

[0459] Additional agents included in a cell composition can include pharmaceutically acceptable salts of the components therein. Pharmaceutically acceptable salts include the acid addition salts (formed with the free amino groups of the polypeptide) that are formed with inorganic acids, such as, for example, hydrochloric or phosphoric acids, or such organic acids as acetic, tartaric, mandelic and the like. Salts formed with the free carboxyl groups can also be derived from inorganic bases, such as, for example, sodium, potassium, ammonium, calcium or ferric hydroxides, and such organic bases as isopropylamine, trimethylamine, 2-ethylamino ethanol, histidine, procaine and the like.

[0460] Physiologically tolerable carriers are well known in the art. Exemplary liquid carriers are sterile aqueous solutions that contain no materials in addition to the active ingredients and water, or contain a buffer such as sodium phosphate at physiological pH value, physiological saline or both, such as phosphate-buffered saline. Still further, aqueous carriers can contain more than one buffer salt, as well as salts such as sodium and potassium chlorides, dextrose, polyethylene glycol and other solutes. Liquid compositions can also contain liquid phases in addition to and to the exclusion of water. Exemplary of such additional liquid phases are glycerin, vegetable oils such as cottonseed oil, and water-oil emulsions. The amount of an active compound used in the cell compositions that is effective in the treatment of a particular disorder or condition can depend on the nature of the disorder or condition, and can be determined by standard clinical techniques.

### Guide RNA Formulation

[0461] Guide RNAs of the present disclosure can be formulated with pharmaceutically acceptable excipients such as carriers, solvents, stabilizers, adjuvants, diluents, etc., depending upon the particular mode of administration and dosage form. Guide RNA compositions can be formulated to achieve a physiologically compatible pH, and range from a pH of about 3 to a pH of about 11, about pH 3 to about pH 7, depending on the formulation and route of administration. In some cases, the pH can be adjusted to a range from about pH 5.0 to about pH 8. In some cases, the compositions can have a therapeutically effective amount of at least one compound as described herein, together with one or more pharmaceutically acceptable excipients. Optionally, the compositions can have a combination of the compounds described herein, or can include a second active ingredient useful in the treatment or prevention of bacterial growth (for example and without limitation, anti-bacterial or anti-microbial agents), or can include a combination of reagents of the present disclosure.

[0462] Suitable excipients include, for example, carrier molecules that include large, slowly metabolized macromolecules such as proteins, polysaccharides, polylactic acids, polyglycolic acids, polymeric amino acids, amino acid copolymers, and inactive virus particles. Other exemplary excipients can include antioxidants (for example and without limitation, ascorbic acid), chelating agents (for example and without limitation, EDTA), carbohydrates (for example and without limitation, dextrin, hydroxyalkylcellulose, and hydroxyalkylmethylcellulose), stearic acid, liquids (for example and without limitation, oils, water, saline, glycerol and ethanol), wetting or emulsifying agents, pH buffering substances, and the like.

### Delivery

[0463] Guide RNA polynucleotides (RNA or DNA) and/or endonuclease polynucleotide(s) (RNA or DNA) can be delivered by viral or non-viral delivery vehicles known in the art. Alternatively, endonuclease polypeptide(s) can be delivered by viral or non-viral delivery vehicles known in the art, such as electroporation or lipid nanoparticles. In further alternative aspects, the DNA endonuclease can be delivered as one or more polypeptides, either alone or pre-complexed with one or more guide RNAs, or one or more crRNA together with a tracrRNA.

[0464] Polynucleotides can be delivered by non-viral delivery vehicles including, but not limited to, nanoparticles, liposomes, ribonucleoproteins, positively charged peptides, small molecule RNA-conjugates, aptamer-RNA chimeras, and RNA-fusion protein complexes. Some exemplary non-viral delivery vehicles are described in Peer and Lieberman, Gene Therapy, 18: 1127-1133 (2011) (which focuses on non-viral delivery vehicles for siRNA that are also useful for delivery of other polynucleotides).

[0465] For polynucleotides of the disclosure, the formulation may be selected from any of those taught, for example, in International Application PCT/US2012069610, the contents of which are incorporated herein by reference in its entirety

[0466] Polynucleotides, such as guide RNA, sgRNA, and mRNA encoding an endonuclease, can be delivered to a cell or a patient by a lipid nanoparticle (LNP).

[0467] A LNP refers to any particle having a diameter of less than 1000 nm, 500 nm, 250 nm, 200 nm, 150 nm, 100 nm, 75 nm, 50 nm, or 25 nm. Alternatively, a nanoparticle can range in size from 1-1000 nm, 1-500 nm, 1-250 nm, 25-200 nm, 25-100 nm, 35-75 nm, or 25-60 nm.

[0468] LNPs can be made from cationic, anionic, or neutral lipids. Neutral lipids, such as the fusogenic phospholipid DOPE or the membrane component cholesterol, can be included in LNPs as ‘helper lipids’ to enhance transfection activity and nanoparticle stability. Limitations of cationic lipids include low efficacy owing to poor stability and rapid clearance, as well as the generation of inflammatory or anti-inflammatory responses.

[0469] LNPs can also have hydrophobic lipids, hydrophilic lipids, or both hydrophobic and hydrophilic lipids.

[0470] Any lipid or combination of lipids that are known in the art can be used to produce a LNP. Examples of lipids used to produce LNPs are: DOTMA, DOSPA, DOTAP, DMRIE, DC-cholesterol, DOTAP-cholesterol, GAP-DMORIE-DPyPE, and GL67A-DOPE-DMPE-polyethylene glycol (PEG). Examples of cationic lipids are: 98N12-5, C12-200, DLin-KC2-DMA (KC2), DLin-MC3-DMA (MC3), XTC, MDI, and 7C1. Examples of neutral lipids are: DPSC, DPPC, POPC, DOPE, and SM. Examples of PEG-modified lipids are: PEG-DMG, PEG-CerC14, and PEG-CerC20.

[0471] The lipids can be combined in any number of molar ratios to produce a LNP. In addition, the polynucleotide(s) can be combined with lipid(s) in a wide range of molar ratios to produce a LNP.

[0472] As stated previously, the site-directed polypeptide and genome-targeting nucleic acid can each be administered separately to a cell or a patient. On the other hand, the site-directed polypeptide can be pre-complexed with one or more guide RNAs, or one or more crRNA together with a tracrRNA. The pre-complexed material can then be administered to a cell or a patient. Such pre-complexed material is known as a ribonucleoprotein particle (RNP).

[0473] RNA is capable of forming specific interactions with RNA or DNA. While this property is exploited in many biological processes, it also comes with the risk of promiscuous interactions in a nucleic acid-rich cellular environment. One solution to this problem is the formation of ribonucleoprotein particles (RNPs), in which the RNA is pre-complexed with an endonuclease. Another benefit of the RNP is protection of the RNA from degradation.

[0474] The endonuclease in the RNP can be modified or unmodified. Likewise, the gRNA, crRNA, tracrRNA, or sgRNA can be modified or unmodified. Numerous modifications are known in the art and can be used.

[0475] The endonuclease and sgRNA can be generally combined in a 1:1 molar ratio. Alternatively, the endonuclease, crRNA and tracrRNA can be generally combined in a 1:1:1 molar ratio. However, a wide range of molar ratios can be used to produce a RNP.

### AAV (Adeno Associated Virus)

[0476] A recombinant adeno-associated virus (AAV) vector can be used for delivery. Techniques to produce rAAV particles, in which an AAV genome to be packaged that includes the polynucleotide to be delivered, rep and cap genes, and helper virus functions are provided to a cell are standard in the art. Production of rAAV typically requires that the following components are present within a single cell (denoted herein as a packaging cell): a rAAV genome, AAV rep and cap genes separate from (i.e., not in) the rAAV genome, and helper virus functions. The AAV rep and cap genes may be from any AAV serotype for which recombinant virus can be derived, and may be from a different AAV serotype than the rAAV genome ITRs, including, but not limited to, AAV serotypes described herein. Production of pseudotyped rAAV is disclosed in, for example, international patent application publication number WO 01/83692.

### AAV Serotypes

[0477] AAV particles packaging polynucleotides encoding compositions of the disclosure, e.g., endonucleases, donor sequences, or RNA guide molecules, of the present disclosure may have or be derived from any natural or recombinant AAV serotype. According to the present disclosure, the AAV particles may utilize or be based on a serotype selected from any of the following serotypes, and variants thereof including but not limited to AAV1, AAV10, AAV106.1/hu.37, AAV11, AAV114.3/hu.40, AAV12, AAV127.2/hu.41, AAV127.5/hu.42, AAV128.1/hu.43, AAV128.3/hu.44, AAV130.4/hu.48, AAV145.1/hu.53, AAV145.5/hu.54, AAV145.6/hu.55, AAV16.12/hu.11, AAV16.3, AAV16.8/hu.10, AAV161.10/hu.60, AAV161.6/hu.61, AAV1-7/rh.48, AAV1-8/rh.49, AAV2, AAV2.5T, AAV2-15/rh.62, AAV223.1, AAV223.2, AAV223.4, AAV223.5, AAV223.6, AAV223.7, AAV2-3/rh.61, AAV24.1, AAV2-4/rh.50, AAV2-5/rh.51, AAV27.3, AAV29.3/bb.1, AAV29.5/bb.2, AAV2G9, AAV-2-pre-miRNA-101, AAV3, AAV3.1/hu.6, AAV3.1/hu.9, AAV3-11/rh.53, AAV3-3. AAV33.12/hu.17, AAV33.4/hu.15, AAV33.8/hu.16, AAV3-9/rh.52, AAV3a, AAV3b, AAV4, AAV4-19/rh.55, AAV42.12, AAV42-10, AAV42-11, AAV42-12, AAV42-13, AAV42-15, AAV42-1b, AAV42-2, AAV42-3a, AAV42-3b, AAV42-4, AAV42-5a, AAV42-5b, AAV42-6b, AAV42-8, AAV42-aa, AAV43-1, AAV43-12, AAV43-20, AAV43-21, AAV43-23, AAV43-25, AAV43-5, AAV4-4, AAV44.1, AAV44.2, AAV44.5, AAV46.2/hu.28, AAV46.6/hu.29, AAV4-8/r11.64, AAV4-8/rh.64, AAV4-9/rh.54, AAV5, AAV52.1/hu.20, AAV52/hu.19, AAV5-22/rh.58, AAV5-3/rh.57, AAV54.1/hu.21, AAV54.2/hu.22, AAV54.4R/hu.27, AAV54.5/hu.23, AAV54.7/hu.24, AAV58.2/hu.25, AAV6, AAV6.1, AAV6.1.2, AAV6.2, AAV7, AAV7.2, AAV7.3/hu.7, AAV8, AAV-8b, AAV-8h, AAV9, AAV9.11, AAV9.13, AAV9.16, AAV9.24, AAV9.45, AAV9.47, AAV9.61, AAV9.68, AAV9.84, AAV9.9, AAVA3.3, AAVA3.4, AAVA3.5, AAVA3.7, AAV-b, AAVC1, AAVC2, AAVC5, AAVCh.5, AAVCh.5R1, AAVcy.2, AAVcy.3, AAVcy.4, AAVcy.5, AAVCy.5R1, AAVCy.5R2, AAVCy.5R3, AAVCy.5R4, AAVcy.6, AAV-DJ, AAV-DJ8, AAVF3, AAVF5, AAV-h, AAVH-1/hu.1, AAVH2, AAVH-5/hu.3, AAVH6, AAVhE1.1, AAVhER1.14, AAVhEr1.16, AAVhEr1.18, AAVhER1.23, AAVhEr1.35, AAVhEr1.36, AAVhEr1.5, AAVhEr1.7, AAVhEr1.8, AAVhEr2.16, AAVhEr2.29, AAVhEr2.30, AAVhEr2.31, AAVhEr2.36, AAVhEr2.4, AAVhEr3.1, AAVhu.1, AAVhu.10, AAVhu.11, AAVhu.11, AAVhu.12, AAVhu.13, AAVhu.14/9, AAVhu.15, AAVhu.16, AAVhu.17, AAVhu.18, AAVhu.19, AAVhu.2, AAVhu.20, AAVhu.21, AAVhu.22, AAVhu.23.2, AAVhu.24, AAVhu.25, AAVhu.27, AAVhu.28, AAVhu.29, AAVhu.29R, AAVhu.3, AAVhu.31, AAVhu.32, AAVhu.34, AAVhu.35, AAVhu.37, AAVhu.39, AAVhu.4, AAVhu.40, AAVhu.41, AAVhu.42, AAVhu.43, AAVhu.44, AAVhu.44R1, AAVhu.44R2, AAVhu.44R3, AAVhu.45, AAVhu.46, AAVhu.47, AAVhu.48, AAVhu.48R1, AAVhu.48R2, AAVhu.48R3, AAVhu.49, AAVhu.5, AAVhu.51, AAVhu.52, AAVhu.53, AAVhu.54, AAVhu.55, AAVhu.56, AAVhu.57, AAVhu.58, AAVhu.6, AAVhu.60, AAVhu.61, AAVhu.63, AAVhu.64, AAVhu.66, AAVhu.67, AAVhu.7, AAVhu.8, AAVhu.9, AAVhu.t19, AAVLG-10/rh.40, AAVLG-4/rh.38, AAVLG-9/hu.39, AAVLG-9/hu.39, AAV-LK01, AAV-LK02, AAVLK03, AAV-LK03, AAV-LK04, AAV-LK05, AAV-LK06, AAV-LK07, AAV-LK08. AAV-LK09, AAV-LK10, AAV-LK11, AAV-LK12, AAV-LK13, AAV-LK14, AAV-LK15, AAV-LK17, AAV-LK18, AAV-LK19, AAVN721-8/rh.43, AAV-PAEC, AAV-PAEC11, AAV-PAEC 12, AAV-PAEC2, AAV-PAEC4, AAV-PAEC6, AAV-PAEC7, AAV-PAEC8, AAVpi.1, AAVpi.2, AAVpi.3, AAVrh.10, AAVrh.12, AAVrh.13, AAVrh.13R, AAVrh.14, AAVrh.17, AAVrh.18, AAVrh.19, AAVrh.2, AAVrh.20, AAVrh.21, AAVrh.22, AAVrh.23, AAVrh.24, AAVrh.25, AAVrh.2R, AAVrh.31, AAVrh.32, AAVrh.33, AAVrh.34, AAVrh.35, AAVrh.36, AAVrh.37, AAVrh.37R2, AAVrh.38, AAVrh.39, AAVrh.40, AAVrh.43, AAVrh.44, AAVrh.45, AAVrh.46, AAVrh.47, AAVrh.48, AAVrh.48, AAVrh.48.1, AAVrh.48.1.2, AAVrh.48.2, AAVrh.49, AAVrh.50, AAVrh.51, AAVrh.52, AAVrh.53, AAVrh.54, AAVrh.55, AAVrh.56, AAVrh.57, AAVrh.58, AAVrh.59, AAVrh.60, AAVrh.61, AAVrh.62, AAVrh.64, AAVrh.64R1, AAVrh.64R2, AAVrh.65, AAVrh.67, AAVrh.68, AAVrh.69, AAVrh.70, AAVrh.72, AAVrh.73, AAVrh.74, AAVrh.8, AAVrh.8R, AAVrh8R, AAVrh8R A586R mutant, AAVrh8R R533A mutant, BAAV, BNP61 AAV, BNP62 AAV, BNP63 AAV, bovine AAV, caprine AAV, Japanese AAV10, true type AAV (ttAAV), UPENN AAV10, AAV-LK16, AAAV, AAV Shuffle 100-1, AAV Shuffle 100-2, AAV Shuffle 100-3, AAV Shuffle 100-7, AAV Shuffle 10-2, AAV Shuffle 10-6, AAV Shuffle 10-8, AAV SM 100-10, AAV SM 100-3, AAV SM 10-1, AAV SM 10-2, and/or AAV SM 10-8.

[0478] In some embodiments, the AAV serotype may be, or have, a mutation in the AAV9 sequence as described by N Pulicherla et al. (Molecular Therapy 19(6): 1070-1078 (2011), herein incorporated by reference in its entirety), such as but not limited to, AAV9.9, AAV9.11, AAV9.13, AAV9.16, AAV9.24, AAV9.45, AAV9.47, AAV9.61, AAV9.68, AAV9.84.

[0479] In some embodiments, the AAV serotype may be, or have, a sequence as described in U.S. Pat. No. 6,156,303, the contents of which are herein incorporated by reference in their entirety, such as, but not limited to, AAV3B (SEQ ID NO: 1 and 10 of U.S. Pat. No. 6,156,303), AAV6 (SEQ ID NO: 2, 7 and 11 of U.S. Pat. No. 6,156,303), AAV2 (SEQ ID NO: 3 and 8 of U.S. Pat. No. 6,156,303), AAV3A (SEQ ID NO: 4 and 9, of U.S. Pat. No. 6,156,303), or derivatives thereof.

[0480] In some embodiments, the serotype may be AAVDJ or a variant thereof, such as AAVDJ8 (or AAV-DJ8), as described by Grimm et al. (Journal of Virology 82(12): 5887-5911 (2008), herein incorporated by reference in its entirety). The amino acid sequence of AAVDJ8 may have two or more mutations in order to remove the heparin binding domain (HBD). As a non-limiting example, the AAV-DJ sequence described as SEQ ID NO: 1 in U.S. Pat. No. 7,588,772, the contents of which are herein incorporated by reference in their entirety, may have two mutations: (1) R587Q where arginine (R; Arg) at amino acid 587 is changed to glutamine (Q; Gin) and (2) R590T where arginine (R; Arg) at amino acid 590 is changed to threonine (T; Thr). As another non-limiting example, may have three mutations: (1) K406R where lysine (K; Lys) at amino acid 406 is changed to arginine (R; Arg), (2) R587Q where arginine (R; Arg) at amino acid 587 is changed to glutamine (Q; Gin) and (3) R590T where arginine (R; Arg) at amino acid 590 is changed to threonine (T; Thr).

[0481] In some embodiments, the AAV serotype may be, or have, a sequence as described in International Publication No. WO2015121501, the contents of which are herein incorporated by reference in their entirety, such as, but not limited to, true type AAV (ttAAV) (SEQ ID NO: 2 of WO2015121501), “UPenn AAV10” (SEQ ID NO: 8 of WO2015121501), “Japanese AAV10” (SEQ ID NO: 9 of WO2015121501), or variants thereof.

[0482] According to the present disclosure, AAV capsid serotype selection or use may be from a variety of species. In one embodiment, the AAV may be an avian AAV (AAAV). The AAAV serotype may be, or have, a sequence as described in U.S. Pat. No. 9,238,800, the contents of which are herein incorporated by reference in their entirety, such as, but not limited to, AAAV (SEQ ID NO: 1, 2, 4, 6, 8, 10, 12, and 14 of U.S. Pat. No. 9,238,800), or variants thereof.

[0483] In one embodiment, the AAV may be a bovine AAV (BAAV). The BAAV serotype may be, or have, a sequence as described in U.S. Pat. No. 9,193,769, the contents of which are herein incorporated by reference in their entirety, such as, but not limited to, BAAV (SEQ ID NO: 1 and 6 of U.S. Pat. No. 9,193,769), or variants thereof. The BAAV serotype may be or have a sequence as described in U.S. Pat. No. 7,427,396, the contents of which are herein incorporated by reference in their entirety, such as, but not limited to, BAAV (SEQ ID NO: 5 and 6 of U.S. Pat. No. 7,427,396), or variants thereof.

[0484] In one embodiment, the AAV may be a caprine AAV. The caprine AAV serotype may be, or have, a sequence as described in U.S. Pat. No. 7,427,396, the contents of which are herein incorporated by reference in their entirety, such as, but not limited to, caprine AAV (SEQ ID NO: 3 of U.S. Pat. No. 7,427,396), or variants thereof.

[0485] In other embodiments the AAV may be engineered as a hybrid AAV from two or more parental serotypes. In one embodiment, the AAV may be AAV2G9 which has sequences from AAV2 and AAV9. The AAV2G9 AAV serotype may be, or have, a sequence as described in United States Patent Publication No. US20160017005, the contents of which are herein incorporated by reference in its entirety.

[0486] In one embodiment, the AAV may be a serotype generated by the AAV9 capsid library with mutations in amino acids 390-627 (VP1 numbering) as described by Pulicherla et al. (Molecular Therapy 19(6): 1070-1078 (2011), the contents of which are herein incorporated by reference in their entirety. The serotype and corresponding nucleotide and amino acid substitutions may be, but is not limited to, AAV9.1 (G1594C; D532H), AAV6.2 (T1418A and T1436X; V473D and 1479K), AAV9.3 (T1238A; F413Y), AAV9.4 (T1250C and A1617T; F417S), AAV9.5 (A1235G, A1314T, A1642G, C1760T; Q412R, T548A, A587V), AAV9.6 (T1231A; F411I), AAV9.9 (G1203A, G1785T; W595C), AAV9.10 (A1500G, T1676C; M559T), AAV9.11 (A1425T, A1702C, A1769T; T568P, Q590L), AAV9.13 (A1369C, A1720T; N457H, T574S), AAV9.14 (T1340A, T1362C. T1560C, G1713A; L447H), AAV9.16 (A1775T; Q592L), AAV9.24 (T1507C, T1521G; W503R), AAV9.26 (A1337G, A1769C; Y446C, Q590P), AAV9.33 (A1667C; D556A), AAV9.34 (A1534G, C1794T; N512D), AAV9.35 (A1289T, T1450A, C1494T, A1515T, C1794A, G1816A; Q430L, Y484N, N98K, V606I), AAV9.40 (A1694T, E565V), AAV9.41 (A1348T, T1362C; T450S), AAV9.44 (A1684C, A1701T, A1737G; N562H, K567N), AAV9.45 (A1492T, C1804T; N498Y, L602F), AAV9.46 (G1441C, T1525C. T1549G; G481R, W509R. L517V), 9.47 (G1241A, G1358A, A1669G, C1745T; S414N, G453D, K557E, T5821), AAV9.48 (C1445T, A1736T; P482L, Q579L), AAV9.50 (A1638T, C1683T, T1805A; Q546H, L602H), AAV9.53 (G1301A, A1405C, C1664T, G1811T; R134Q, S469R, A555V, G604V), AAV9.54 (C1531A. T1609A; L511I, L537M), AAV9.55 (T1605A; F535L), AAV9.58 (C1475T, C1579A; T4921, H527N), AAV.59 (T1336C; Y446H), AAV9.61 (A1493T; N4981), AAV9.64 (C1531A. A1617T; L511I), AAV9.65 (C1335T, T1530C, C1568A; A523D), AAV9.68 (C1510A; P504T), AAV9.80 (G1441A; G481R), AAV9.83 (C1402A, A1500T; P468T, E500D), AAV9.87 (T1464C, T1468C; S490P), AAV9.90 (A1196T; Y399F), AAV9.91 (T1316G, A1583T, C1782G, T1806C; L439R. K5281), AAV9.93 (A1273G, A1421G, A1638C, C1712T, G1732A, A1744T, A1832T; S425G, Q474R, Q546H, P571L, G578R, T582S, D611V), AAV9.94 (A1675T M559L) and AAV9.95 (T1605A; F535L).

[0487] In one embodiment, the AAV may be a serotype having at least one AAV capsid CD8+ T-cell epitope. As a non-limiting example, the serotype may be AAV1, AAV2 or AAV8.

[0488] In one embodiment, the AAV may be a serotype selected from any of those found in Table 5 and 6.

[0489] In one embodiment, the AAV may be encoded by a sequence, fragment or variant as described in Table 5 or 6.

TABLE 5
AAV Serotypes

| Serotype | SEQ ID NO | Reference information for Serotype Sequence |
|---|---|---|
| AAV1.3 | 4697 | US20030138772 SEQ ID NO: 14 |
| AAV16.3 | 4698 | US20030138772 SEQ ID NO: 105 |
| AAV223.10 | 4699 | US20030138772 SEQ ID NO: 75 |
| AAV223.2 | 4700 | US20030138772 SEQ ID NO: 49 |
| AAV223.2 | 4701 | US20030138772 SEQ ID NO: 76 |
| AAV223.4 | 4702 | US20030138772 SEQ ID NO: 50 |
| AAV223.4 | 4703 | US20030138772 SEQ ID NO: 73 |
| AAV223.5 | 4704 | US20030138772 SEQ ID NO: 51 |
| AAV223.5 | 4705 | US20030138772 SEQ ID NO: 74 |
| AAV223.6 | 4706 | US20030138772 SEQ ID NO: 52 |
| AAV223.6 | 4707 | US20030138772 SEQ ID NO: 78 |
| AAV223.7 | 4708 | US20030138772 SEQ ID NO: 53 |
| AAV223.7 | 4709 | US20030138772 SEQ ID NO: 77 |
| AAV24.1 | 4710 | US20030138772 SEQ ID NO: 101 |
| AAV27.3 | 4711 | US20030138772 SEQ ID NO: 104 |
| AAV29.3 | 4712 | US20030138772 SEQ ID NO: 82 |
| AAV29.3 | 4713 | US20030138772 SEQ ID NO: 11 |
| (AAVbb.1) | | |
| AAV29.4 | 4714 | US20030138772 SEQ ID NO: 12 |
| AAV29.5 | 4715 | US20030138772 SEQ ID NO: 83 |
| AAV29.5 | 4716 | US20030138772 SEQ ID NO: 13 |
| (AAVbb.2) | | |
| AAV3 | 4717 | US20150159173 SEQ ID NO: 12 |
| AAV3.3b | 4718 | US20030138772 SEQ ID NO: 72 |
| AAV3-3 | 4719 | US20150315612 SEQ ID NO: 200 |
| AAV3-3 | 4720 | US20150315612 SEQ ID NO: 217 |
| AAV42.10 | 4721 | US20030138772 SEQ ID NO: 106 |
| AAV42.11 | 4722 | US20030138772 SEQ ID NO: 108 |
| AAV42.12 | 4723 | US20030138772 SEQ ID NO: 113 |
| AAV42.13 | 4724 | US20030138772 SEQ ID NO: 86 |
| AAV42.15 | 4725 | US20030138772 SEQ ID NO: 84 |
| AAV42.1B | 4726 | US20030138772 SEQ ID NO: 90 |
| AAV42.2 | 4727 | US20030138772 SEQ ID NO: 9 |
| AAV42.2 | 4728 | US20030138772 SEQ ID NO: 102 |
| AAV42.3A | 4729 | US20030138772 SEQ ID NO: 87 |
| AAV42.3b | 4730 | US20030138772 SEQ ID NO: 36 |
| AAV42.3B | 4731 | US20030138772 SEQ ID NO: 107 |
| AAV42.4 | 4732 | US20030138772 SEQ ID NO: 33 |
| AAV42.4 | 4733 | US20030138772 SEQ ID NO: 88 |
| AAV42.5A | 4734 | US20030138772 SEQ ID NO: 89 |
| AAV42.5B | 4735 | US20030138772 SEQ ID NO: 91 |
| AAV42.6B | 4736 | US20030138772 SEQ ID NO: 112 |
| AAV42.8 | 4737 | US20030138772 SEQ ID NO: 27 |
| AAV42.8 | 4738 | US20030138772 SEQ ID NO: 85 |
| AAV43.1 | 4739 | US20030138772 SEQ ID NO: 39 |
| AAV43.1 | 4740 | US20030138772 SEQ ID NO: 92 |
| AAV43.12 | 4741 | US20030138772 SEQ ID NO: 41 |
| AAV43.12 | 4742 | US20030138772 SEQ ID NO: 93 |
| AAV43.20 | 4743 | US20030138772 SEQ ID NO: 42 |
| AAV43.20 | 4744 | US20030138772 SEQ ID NO: 99 |
| AAV43.21 | 4745 | US20030138772 SEQ ID NO: 43 |
| AAV43.21 | 4746 | US20030138772 SEQ ID NO: 96 |
| AAV43.23 | 4747 | US20030138772 SEQ ID NO: 44 |
| AAV43.23 | 4748 | US20030138772 SEQ ID NO: 98 |
| AAV43.25 | 4749 | US20030138772 SEQ ID NO: 45 |
| AAV43.25 | 4750 | US20030138772 SEQ ID NO: 97 |
| AAV43.5 | 4751 | US20030138772 SEQ ID NO: 40 |
| AAV43.5 | 4752 | US20030138772 SEQ ID NO: 94 |
| AAV4-4 | 4753 | US20150315612 SEQ ID NO: 201 |
| AAV4-4 | 4754 | US20150315612 SEQ ID NO: 218 |
| AAV44.1 | 4755 | US20030138772 SEQ ID NO: 46 |
| AAV44.1 | 4756 | US20030138772 SEQ ID NO: 79 |
| AAV44.2 | 4757 | US20030138772 SEQ ID NO: 59 |
| AAV44.5 | 4758 | US20030138772 SEQ ID NO: 47 |
| AAV44.5 | 4759 | US20030138772 SEQ ID NO: 80 |
| AAV4407 | 4760 | US20150315612 SEQ ID NO: 90 |
| AAV5 | 4761 | US20030138772 SEQ ID NO: 114 |
| AAV6 | 4762 | US20150315612 SEQ ID NO: 220 |
| AAV6.1 | 4763 | US20150159173 |
| AAV6.12 | 4764 | US20150159173 |
| AAV6.2 | 4765 | US20150159173 |
| AAV7.2 | 4766 | US20030138772 SEQ ID NO: 103 |
| AAV9 | 4767 | US20150315612 SEQ ID NO: 3 |
| (AAVhu.14) | | |
| AAV9 | 4768 | US20150315612 SEQ ID NO: 123 |
| (AAVhu.14) | | |
| AAVA3.1 | 4769 | US20030138772 SEQ ID NO: 120 |
| AAVA3.3 | 4770 | US20030138772 SEQ ID NO: 57 |
| AAVA3.3 | 4771 | US20030138772 SEQ ID NO: 66 |
| AAVA3.4 | 4772 | US20030138772 SEQ ID NO: 54 |
| AAVA3.4 | 4773 | US20030138772 SEQ ID NO: 68 |
| AAVA3.5 | 4774 | US20030138772 SEQ ID NO: 55 |
| AAVA3.5 | 4775 | US20030138772 SEQ ID NO: 69 |
| AAVA3.7 | 4776 | US20030138772 SEQ ID NO: 56 |
| AAVA3.7 | 4777 | US20030138772 SEQ ID NO: 67 |
| AAVC1 | 4778 | US20030138772 SEQ ID NO: 60 |
| AAVC2 | 4779 | US20030138772 SEQ ID NO: 61 |
| AAVC5 | 4780 | US20030138772 SEQ ID NO: 62 |
| AAVCh.5 | 4781 | US20150159173 SEQ ID NO: 46, US20150315612 SEQ ID NO: |
| | | 234 |
| AAVcy.2 | 4782 | US20030138772 SEQ ID NO: 15 |
| (AAV13.3) | | |
| AAVcy.3 | 4783 | US20030138772 SEQ ID NO: 16 |
| (AAV24.1) | | |
| AAVcy.4 | 4784 | US20030138772 SEQ ID NO: 17 |
| (AAV27.3) | | |
| AAVcy.5 | 4785 | US20150315612 SEQ ID NO: 227 |
| AAVcy.5 | 4786 | US20150159173 SEQ ID NO: 8 |
| AAVcy.5 | 4787 | US20150159173 SEQ ID NO: 24 |
| AAVcy.5 | 4788 | US20030138772 SEQ ID NO: 18 |
| (AAV7.2) | | |
| AAVCy.5R1 | 4789 | US20150159173 |
| AAVCy.5R2 | 4790 | US20150159173 |
| AAVCy.5R3 | 4791 | US20150159173 |
| AAVCy.5R4 | 4792 | US20150159173 |
| AAVcy.6 | 4793 | US20030138772 SEQ ID NO: 10 |
| (AAV16.3) | | |
| AAVF1 | 4794 | US20030138772 SEQ ID NO: 109 |
| AAVF3 | 4795 | US20030138772 SEQ ID NO: 111 |
| AAVF5 | 4796 | US20030138772 SEQ ID NO: 110 |
| AAVH2 | 4797 | US20030138772 SEQ ID NO: 26 |
| AAVH6 | 4798 | US20030138772 SEQ ID NO: 25 |
| AAVhu.1 | 4799 | US20150315612 SEQ ID NO: 46 |
| AAVhu.1 | 4800 | US20150315612 SEQ ID NO: 144 |
| AAVhu.10 | 4801 | US20150315612 SEQ ID NO: 56 |
| (AAV16.8) | | |
| AAVhu.10 | 4802 | US20150315612 SEQ ID NO: 156 |
| (AAV16.8) | | |
| AAVhu.11 | 4803 | US20150315612 SEQ ID NO: 57 |
| (AAV16.12) | | |
| AAVhu.11 | 4804 | US20150315612 SEQ ID NO: 153 |
| (AAV16.12) | | |
| AAVhu.12 | 4805 | US20150315612 SEQ ID NO: 59 |
| AAVhu.12 | 4806 | US20150315612 SEQ ID NO: 154 |
| AAVhu.13 | 4807 | US20150159173 SEQ ID NO: 16, US20150315612 SEQ ID NO: 71 |
| AAVhu.13 | 4808 | US20150159173 SEQ ID NO: 32, US20150315612 SEQ ID NO: |
| | | 129 |
| AAVhu.136.1 | 4809 | US20150315612 SEQ ID NO: 165 |
| AAVhu.140.1 | 4810 | US20150315612 SEQ ID NO: 166 |
| AAVhu.140.2 | 4811 | US20150315612 SEQ ID NO: 167 |
| AAVhu.145.6 | 4812 | US20150315612 SEQ ID No: 178 |
| AAVhu.15 | 4813 | US20150315612 SEQ ID NO: 147 |
| AAVhu.15 | 4814 | US20150315612 SEQ ID NO: 50 |
| (AAV33.4) | | |
| AAVhu.156.1 | 4815 | US20150315612 SEQ ID No: 179 |
| AAVhu.16 | 4816 | US20150315612 SEQ ID NO: 148 |
| AAVhu.16 | 4817 | US20150315612 SEQ ID NO: 51 |
| (AAV33.8) | | |
| AAVhu.17 | 4818 | US20150315612 SEQ ID NO: 83 |
| AAVhu.17 | 4819 | US20150315612 SEQ ID NO: 4 |
| (AAV33.12) | | |
| AAVhu.172.1 | 4820 | US20150315612 SEQ ID NO: 171 |
| AAVhu.172.2 | 4821 | US20150315612 SEQ ID NO: 172 |
| AAVhu.173.4 | 4822 | US20150315612 SEQ ID NO: 173 |
| AAVhu.173.8 | 4823 | US20150315612 SEQ ID NO: 175 |
| AAVhu.18 | 4824 | US20150315612 SEQ ID NO: 52 |
| AAVhu.18 | 4825 | US20150315612 SEQ ID NO: 149 |
| AAVhu.19 | 4826 | US20150315612 SEQ ID NO: 62 |
| AAVhu.19 | 4827 | US20150315612 SEQ ID NO: 133 |
| AAVhu.2 | 4828 | US20150315612 SEQ ID NO: 48 |
| AAVhu.2 | 4829 | US20150315612 SEQ ID NO: 143 |
| AAVhu.20 | 4830 | US20150315612 SEQ ID NO: 63 |
| AAVhu.20 | 4831 | US20150315612 SEQ ID NO: 134 |
| AAVhu.21 | 4832 | US20150315612 SEQ ID NO: 65 |
| AAVhu.21 | 4833 | US20150315612 SEQ ID NO: 135 |
| AAVhu.22 | 4834 | US20150315612 SEQ ID NO: 67 |
| AAVhu.22 | 4835 | US20150315612 SEQ ID NO: 138 |
| AAVhu.23 | 4836 | US20150315612 SEQ ID NO: 60 |
| AAVhu.23.2 | 4837 | US20150315612 SEQ ID NO: 137 |
| AAVhu.24 | 4838 | US20150315612 SEQ ID NO: 66 |
| AAVhu.24 | 4839 | US20150315612 SEQ ID NO: 136 |
| AAVhu.25 | 4840 | US20150315612 SEQ ID NO: 49 |
| AAVhu.25 | 4841 | US20150315612 SEQ ID NO: 146 |
| AAVhu.26 | 4842 | US20150159173 SEQ ID NO: 17, US20150315612 SEQ ID NO: 61 |
| AAVhu.26 | 4843 | US20150159173 SEQ ID NO: 33, US20150315612 SEQ ID NO: |
| | | 139 |
| AAVhu.27 | 4844 | US20150315612 SEQ ID NO: 64 |
| AAVhu.27 | 4845 | US20150315612 SEQ ID NO: 140 |
| AAVhu.28 | 4846 | US20150315612 SEQ ID NO: 68 |
| AAVhu.28 | 4847 | US20150315612 SEQ ID NO: 130 |
| AAVhu.29 | 4848 | US20150315612 SEQ ID NO: 69 |
| AAVhu.29 | 4849 | US20150159173 SEQ ID NO: 42, US20150315612 SEQ ID NO: |
| | | 132 |
| AAVhu.29 | 4850 | US20150315612 SEQ ID NO: 225 |
| AAVhu.29R | 4851 | US20150159173 |
| AAVhu.3 | 4852 | US20150315612 SEQ ID NO: 44 |
| AAVhu.3 | 4853 | US20150315612 SEQ ID NO: 145 |
| AAVhu.30 | 4854 | US20150315612 SEQ ID NO: 70 |
| AAVhu.30 | 4855 | US20150315612 SEQ ID NO: 131 |
| AAVhu.31 | 4856 | US20150315612 SEQ ID NO: 1 |
| AAVhu.31 | 4857 | US20150315612 SEQ ID NO: 121 |
| AAVhu.32 | 4858 | US20150315612 SEQ ID NO: 2 |
| AAVhu.32 | 4859 | US20150315612 SEQ ID NO: 122 |
| AAVhu.33 | 4860 | US20150315612 SEQ ID NO: 75 |
| AAVhu.33 | 4861 | US20150315612 SEQ ID NO: 124 |
| AAVhu.34 | 4862 | US20150315612 SEQ ID NO: 72 |
| AAVhu.34 | 4863 | US20150315612 SEQ ID NO: 125 |
| AAVhu.35 | 4864 | US20150315612 SEQ ID NO: 73 |
| AAVhu.35 | 4865 | US20150315612 SEQ ID NO: 164 |
| AAVhu.36 | 4866 | US20150315612 SEQ ID NO: 74 |
| AAVhu.36 | 4867 | US20150315612 SEQ ID NO: 126 |
| AAVhu.37 | 4868 | US20150159173 SEQ ID NO: 34, US20150315612 SEQ ID NO: 88 |
| AAVhu.37 | 4869 | US20150315612 SEQ ID NO: 10, US20150159173 SEQ ID NO: 18 |
| (AAV106.1) | | |
| AAVhu.38 | 4870 | US20150315612 SEQ ID NO: 161 |
| AAVhu.39 | 4871 | US20150315612 SEQ ID NO: 102 |
| AAVhu.39 | 4872 | US20150315612 SEQ ID NO: 24 |
| (AAVLG-9) | | |
| AAVhu.4 | 4873 | US20150315612 SEQ ID NO: 47 |
| AAVhu.4 | 4874 | US20150315612 SEQ ID NO: 141 |
| AAVhu.40 | 4875 | US20150315612 SEQ ID NO: 87 |
| AAVhu.40 | 4876 | US20150315612 SEQ ID No: 11 |
| (AAV114.3) | | |
| AAVhu.41 | 4877 | US20150315612 SEQ ID NO: 91 |
| AAVhu.41 | 4878 | US20150315612 SEQ ID NO: 6 |
| (AAV127.2) | | |
| AAVhu.42 | 4879 | US20150315612 SEQ ID NO: 85 |
| AAVhu.42 | 4880 | US20150315612 SEQ ID NO: 8 |
| (AAV127.5) | | |
| AAVhu.43 | 4881 | US20150315612 SEQ ID NO: 160 |
| AAVhu.43 | 4882 | US20150315612 SEQ ID NO: 236 |
| AAVhu.43 | 4883 | US20150315612 SEQ ID NO: 80 |
| (AAV128.1) | | |
| AAVhu.44 | 4884 | US20150159173 SEQ ID NO: 45, US20150315612 SEQ ID NO: |
| | | 158 |
| AAVhu.44 | 4885 | US20150315612 SEQ ID NO: 81 |
| (AAV128.3) | | |
| AAVhu.44R1 | 4886 | US20150159173 |
| AAVhu.44R2 | 4887 | US20150159173 |
| AAVhu.44R3 | 4888 | US20150159173 |
| AAVhu.45 | 4889 | US20150315612 SEQ ID NO: 76 |
| AAVhu.45 | 4890 | US20150315612 SEQ ID NO: 127 |
| AAVhu.46 | 4891 | US20150315612 SEQ ID NO: 82 |
| AAVhu.46 | 4892 | US20150315612 SEQ ID NO: 159 |
| AAVhu.46 | 4893 | US20150315612 SEQ ID NO: 224 |
| AAVhu.47 | 4894 | US20150315612 SEQ ID NO: 77 |
| AAVhu.47 | 4895 | US20150315612 SEQ ID NO: 128 |
| AAVhu.48 | 4896 | US20150159173 SEQ ID NO: 38 |
| AAVhu.48 | 4897 | US20150315612 SEQ ID NO: 157 |
| AAVhu.48 | 4898 | US20150315612 SEQ ID NO: 78 |
| (AAV130.4) | | |
| AAVhu.48R1 | 4899 | US20150159173 |
| AAVhu.48R2 | 4900 | US20150159173 |
| AAVhu.48R3 | 4901 | US20150159173 |
| AAVhu.49 | 4902 | US20150315612 SEQ ID NO: 209 |
| AAVhu.49 | 4903 | US20150315612 SEQ ID NO: 189 |
| AAVhu.5 | 4904 | US20150315612 SEQ ID NO: 45 |
| AAVhu.5 | 4905 | US20150315612 SEQ ID NO: 142 |
| AAVhu.51 | 4906 | US20150315612 SEQ ID NO: 208 |
| AAVhu.51 | 4907 | US20150315612 SEQ ID NO: 190 |
| AAVhu.52 | 4908 | US20150315612 SEQ ID NO: 210 |
| AAVhu.52 | 4909 | US20150315612 SEQ ID NO: 191 |
| AAVhu.53 | 4910 | US20150159173 SEQ ID NO: 19 |
| AAVhu.53 | 4911 | US20150159173 SEQ ID NO: 35 |
| AAVhu.53 | 4912 | US20150315612 SEQ ID NO: 176 |
| (AAV145.1) | | |
| AAVhu.54 | 4913 | US20150315612 SEQ ID NO: 188 |
| AAVhu.54 | 4914 | US20150315612 SEQ ID No: 177 |
| (AAV145.5) | | |
| AAVhu.55 | 4915 | US20150315612 SEQ ID NO: 187 |
| AAVhu.56 | 4916 | US20150315612 SEQ ID NO: 205 |
| AAVhu.56 | 4917 | US20150315612 SEQ ID NO: 168 |
| (AAV145.6) | | |
| AAVhu.56 | 4918 | US20150315612 SEQ ID NO: 192 |
| (AAV145.6) | | |
| AAVhu.57 | 4919 | US20150315612 SEQ ID NO: 206 |
| AAVhu.57 | 4920 | US20150315612 SEQ ID NO: 169 |
| AAVhu.57 | 4921 | US20150315612 SEQ ID NO: 193 |
| AAVhu.58 | 4922 | US20150315612 SEQ ID NO: 207 |
| AAVhu.58 | 4923 | US20150315612 SEQ ID NO: 194 |
| AAVhu.6 | 4924 | US20150315612 SEQ ID NO: 5 |
| (AAV3.1) | | |
| AAVhu.6 | 4925 | US20150315612 SEQ ID NO: 84 |
| (AAV3.1) | | |
| AAVhu.60 | 4926 | US20150315612 SEQ ID NO: 184 |
| AAVhu.60 | 4927 | US20150315612 SEQ ID NO: 170 |
| (AAV161.10) | | |
| AAVhu.61 | 4928 | US20150315612 SEQ ID NO: 185 |
| AAVhu.61 | 4929 | US20150315612 SEQ ID NO: 174 |
| (AAV161.6) | | |
| AAVhu.63 | 4930 | US20150315612 SEQ ID NO: 204 |
| AAVhu.63 | 4931 | US20150315612 SEQ ID NO: 195 |
| AAVhu.64 | 4932 | US20150315612 SEQ ID NO: 212 |
| AAVhu.64 | 4933 | US20150315612 SEQ ID NO: 196 |
| AAVhu.66 | 4934 | US20150315612 SEQ ID NO: 197 |
| AAVhu.67 | 4935 | US20150315612 SEQ ID NO: 215 |
| AAVhu.67 | 4936 | US20150315612 SEQ ID NO: 198 |
| AAVhu.7 | 4937 | US20150315612 SEQ ID NO: 226 |
| AAVhu.7 | 4938 | US20150315612 SEQ ID NO: 150 |
| AAVhu.7 | 4939 | US20150315612 SEQ ID NO: 55 |
| (AAV7.3) | | |
| AAVhu.71 | 4940 | US20150315612 SEQ ID NO: 79 |
| AAVhu.8 | 4941 | US20150315612 SEQ ID NO: 53 |
| AAVhu.8 | 4942 | US20150315612 SEQ ID NO: 12 |
| AAVhu.8 | 4943 | US20150315612 SEQ ID NO: 151 |
| AAVhu.9 | 4944 | US20150315612 SEQ ID NO: 58 |
| (AAV3.1) | | |
| AAVhu.9 | 4945 | US20150315612 SEQ ID NO: 155 |
| (AAV3.1) | | |
| AAVpi.1 | 4946 | US20150315612 SEQ ID NO: 28 |
| AAVpi.1 | 4947 | US20150315612 SEQ ID NO: 93 |
| AAVpi.2 | 4948 | US20150315612 SEQ ID NO: 30 |
| AAVpi.2 | 4949 | US20150315612 SEQ ID NO: 95 |
| AAVpi.3 | 4950 | US20150315612 SEQ ID NO: 29 |
| AAVpi.3 | 4951 | US20150315612 SEQ ID NO: 94 |
| AAVrh.10 | 4952 | US20150159173 SEQ ID NO: 9 |
| AAVrh.10 | 4953 | US20150159173 SEQ ID NO: 25 |
| AAVrh.10 | 4954 | US20030138772 SEQ ID NO: 81 |
| (AAV44.2) | | |
| AAVrh.12 | 4955 | US20030138772 SEQ ID NO: 30 |
| (AAV42.1b) | | |
| AAVrh.13 | 4956 | US20150159173 SEQ ID NO: 10 |
| AAVrh.13 | 4957 | US20150159173 SEQ ID NO: 26 |
| AAVrh.13 | 4958 | US20150315612 SEQ ID NO: 228 |
| AAVrh.13R | 4959 | US20150159173 |
| AAVrh.14 | 4960 | US20030138772 SEQ ID NO: 32 |
| (AAV42.3a) | | |
| AAVrh.17 | 4961 | US20030138772 SEQ ID NO: 34 |
| (AAV42.5a) | | |
| AAVrh.18 | 4962 | US20030138772 SEQ ID NO: 29 |
| (AAV42.5b) | | |
| AAVrh.19 | 4963 | US20030138772 SEQ ID NO: 38 |
| (AAV42.6b) | | |
| AAVrh.2 | 4964 | US20150159173 SEQ ID NO: 39 |
| AAVrh.2 | 4965 | US20150315612 SEQ ID NO: 231 |
| AAVrh.20 | 4966 | US20150159173 SEQ ID NO: 1 |
| AAVrh.21 | 4967 | US20030138772 SEQ ID NO: 35 |
| (AAV42.10) | | |
| AAVrh.22 | 4968 | US20030138772 SEQ ID NO: 37 |
| (AAV42.11) | | |
| AAVrh.23 | 4969 | US20030138772 SEQ ID NO: 58 |
| (AAV42.12) | | |
| AAVrh.24 | 4970 | US20030138772 SEQ ID NO: 31 |
| (AAV42.13) | | |
| AAVrh.25 | 4971 | US20030138772 SEQ ID NO: 28 |
| (AAV42.15) | | |
| AAVrh.2R | 4972 | US20150159173 |
| AAVrh.31 | 4973 | US20030138772 SEQ ID NO: 48 |
| (AAV223.1) | | |
| AAVrh.32 | 4974 | US20030138772 SEQ ID NO: 19 |
| (AAVC1) | | |
| AAVrh.32/33 | 4975 | US20150159173 SEQ ID NO: 2 |
| AAVrh.33 | 4976 | US20030138772 SEQ ID NO: 20 |
| (AAVC3) | | |
| AAVrh.34 | 4977 | US20030138772 SEQ ID NO: 21 |
| (AAVC5) | | |
| AAVrh.35 | 4978 | US20030138772 SEQ ID NO: 22 |
| (AAVF1) | | |
| AAVrh.36 | 4979 | US20030138772 SEQ ID NO: 23 |
| (AAVF3) | | |
| AAVrh.37 | 4980 | US20030138772 SEQ ID NO: 24 |
| AAVrh.37 | 4981 | US20150159173 SEQ ID NO: 40 |
| AAVrh.37 | 4982 | US20150315612 SEQ ID NO: 229 |
| AAVrh.37R2 | 4983 | US20150159173 |
| AAVrh.38 | 4984 | US20150315612 SEQ ID NO: 7 |
| (AAVLG-4) | | |
| AAVrh.38 | 4985 | US20150315612 SEQ ID NO: 86 |
| (AAVLG-4) | | |
| AAVrh.39 | 4986 | US20150159173 SEQ ID NO: 20, US20150315612 SEQ ID NO: 13 |
| AAVrh.39 | 4987 | US20150159173 SEQ ID NO: 3, US20150159173 SEQ ID NO: 36, |
| | | US20150315612 SEQ ID NO: 89 |
| AAVrh.40 | 4988 | US20150315612 SEQ ID NO: 92 |
| AAVrh.40 | 4989 | US20150315612 SEQ ID No: 14 |
| (AAVLG-10) | | |
| AAVrh.43 | 4990 | US20150315612 SEQ ID NO: 43, US20150159173 SEQ ID NO: 21 |
| (AAVN721-8) | | |
| AAVrh.43 | 4991 | US20150315612 SEQ ID NO: 163, US20150159173 SEQ ID NO: |
| (AAVN721-8) | | 37 |
| AAVrh.44 | 4992 | US20150315612 SEQ ID NO: 34 |
| AAVrh.44 | 4993 | US20150315612 SEQ ID NO: 111 |
| AAVrh.45 | 4994 | US20150315612 SEQ ID NO: 41 |
| AAVrh.45 | 4995 | US20150315612 SEQ ID NO: 109 |
| AAVrh.46 | 4996 | US20150159173 SEQ ID NO: 22, US20150315612 SEQ ID NO: 19 |
| AAVrh.46 | 4997 | US20150159173 SEQ ID NO: 4, US20150315612 SEQ ID NO: 101 |
| AAVrh.47 | 4998 | US20150315612 SEQ ID NO: 38 |
| AAVrh.47 | 4999 | US20150315612 SEQ ID NO: 118 |
| AAVrh.48 | 5000 | US20150159173 SEQ ID NO: 44, US20150315612 SEQ ID NO: |
| | | 115 |
| AAVrh.48 (AAV1- | 5001 | US20150315612 SEQ ID NO: 32 |
| 7) | | |
| AAVrh.48.1 | 5002 | US20150159173 |
| AAVrh.48.1.2 | 5003 | US20150159173 |
| AAVrh.48.2 | 5004 | US20150159173 |
| AAVrh.49 (AAV1- | 5005 | US20150315612 SEQ ID NO: 25 |
| 8) | | |
| AAVrh.49 (AAV1- | 5006 | US20150315612 SEQ ID NO: 103 |
| 8) | | |
| AAVrh.50 (AAV2- | 5007 | US20150315612 SEQ ID NO: 23 |
| 4) | | |
| AAVrh.50 (AAV2- | 5008 | US20150315612 SEQ ID NO: 108 |
| 4) | | |
| AAVrh.51 (AAV2- | 5009 | US20150315612 SEQ ID No: 22 |
| 5) | | |
| AAVrh.51 (AAV2- | 5010 | US20150315612 SEQ ID NO: 104 |
| 5) | | |
| AAVrh.52 (AAV3- | 5011 | US20150315612 SEQ ID NO: 18 |
| 9) | | |
| AAVrh.52 (AAV3- | 5012 | US20150315612 SEQ ID NO: 96 |
| 9) | | |
| AAVrh.53 | 5013 | US20150315612 SEQ ID NO: 97 |
| AAVrh.53 (AAV3- | 5014 | US20150315612 SEQ ID NO: 17 |
| 11) | | |
| AAVrh.53 (AAV3- | 5015 | US20150315612 SEQ ID NO: 186 |
| 11) | | |
| AAVrh.54 | 5016 | US20150315612 SEQ ID NO: 40 |
| AAVrh.54 | 5017 | US20150159173 SEQ ID NO: 49, US20150315612 SEQ ID NO: |
| | | 116 |
| AAVrh.55 | 5018 | US20150315612 SEQ ID NO: 37 |
| AAVrh.55 (AAV4- | 5019 | US20150315612 SEQ ID NO: 117 |
| 19) | | |
| AAVrh.56 | 5020 | US20150315612 SEQ ID NO: 54 |
| AAVrh.56 | 5021 | US20150315612 SEQ ID NO: 152 |
| AAVrh.57 | 5022 | US20150315612 SEQ ID NO: 26 |
| AAVrh.57 | 5023 | US20150315612 SEQ ID NO: 105 |
| AAVrh.58 | 5024 | US20150315612 SEQ ID NO: 27 |
| AAVrh.58 | 5025 | US20150159173 SEQ ID NO: 48, US20150315612 SEQ ID NO: |
| | | 106 |
| AAVrh.58 | 5026 | US20150315612 SEQ ID NO: 232 |
| AAVrh.59 | 5027 | US20150315612 SEQ ID NO: 42 |
| AAVrh.59 | 5028 | US20150315612 SEQ ID NO: 110 |
| AAVrh.60 | 5029 | US20150315612 SEQ ID NO: 31 |
| AAVrh.60 | 5030 | US20150315612 SEQ ID NO: 120 |
| AAVrh.61 | 5031 | US20150315612 SEQ ID NO: 107 |
| AAVrh.61 (AAV2- | 5032 | US20150315612 SEQ ID NO: 21 |
| 3) | | |
| AAVrh.62 (AAV2- | 5033 | US20150315612 SEQ ID No: 33 |
| 15) | | |
| AAVrh.62 (AAV2- | 5034 | US20150315612 SEQ ID NO: 114 |
| 15) | | |
| AAVrh.64 | 5035 | US20150315612 SEQ ID No: 15 |
| AAVrh.64 | 5036 | US20150159173 SEQ ID NO: 43, US20150315612 SEQ ID NO: 99 |
| AAVrh.64 | 5037 | US20150315612 SEQ ID NO: 233 |
| AAVRh.64R1 | 5038 | US20150159173 |
| AAVRh.64R2 | 5039 | US20150159173 |
| AAVrh.65 | 5040 | US20150315612 SEQ ID NO: 35 |
| AAVrh.65 | 5041 | US20150315612 SEQ ID NO: 112 |
| AAVrh.67 | 5042 | US20150315612 SEQ ID NO: 36 |
| AAVrh.67 | 5043 | US20150315612 SEQ ID NO: 230 |
| AAVrh.67 | 5044 | US20150159173 SEQ ID NO: 47, US20150315612 SEQ ID NO: |
| | | 113 |
| AAVrh.68 | 5045 | US20150315612 SEQ ID NO: 16 |
| AAVrh.68 | 5046 | US20150315612 SEQ ID NO: 100 |
| AAVrh.69 | 5047 | US20150315612 SEQ ID NO: 39 |
| AAVrh.69 | 5048 | US20150315612 SEQ ID NO: 119 |
| AAVrh.70 | 5049 | US20150315612 SEQ ID NO: 20 |
| AAVrh.70 | 5050 | US20150315612 SEQ ID NO: 98 |
| AAVrh.71 | 5051 | US20150315612 SEQ ID NO: 162 |
| AAVrh.72 | 5052 | US20150315612 SEQ ID NO: 9 |
| AAVrh.73 | 5053 | US20150159173 SEQ ID NO: 5 |
| AAVrh.74 | 5054 | US20150159173 SEQ ID NO: 6 |
| AAVrh.8 | 5055 | US20150159173 SEQ ID NO: 41 |
| AAVrh.8 | 5056 | US20150315612 SEQ ID NO: 235 |
| AAV1 | 5057 | US20150159173 SEQ ID NO: 11, US20150315612 SEQ ID NO: |
| | | 202 |
| AAV1 | 5058 | US20160017295 SEQ ID NO: 1 US20030138772 SEQ ID NO: 64, |
| | | US20150159173 SEQ ID NO: 27, US20150315612 SEQ ID NO: |
| | | 219, U.S. Pat. No. 7,198,951 SEQ ID NO: 5 |
| AAV1 | 5059 | US20030138772 SEQ ID NO: 6 |
| AAV10 | 5060 | US20030138772 SEQ ID NO: 117 |
| AAV10 | 5061 | WO2015121501 SEQ ID NO: 9 |
| AAV10 | 5062 | WO2015121501 SEQ ID NO: 8 |
| AAV11 | 5063 | US20030138772 SEQ ID NO: 118 |
| AAV12 | 5064 | US20030138772 SEQ ID NO: 119 |
| AAV2 | 5065 | US20150159173 SEQ ID NO: 7, US20150315612 SEQ ID NO: 211 |
| AAV2 | 5066 | US20030138772 SEQ ID NO: 70, US20150159173 SEQ ID NO: |
| | | 23, US20150315612 SEQ ID NO: 221, US20160017295 SEQ ID |
| | | NO: 2, U.S. Pat. No. 6,156,303 SEQ ID NO: 4, U.S. Pat. No. 7,198,951 SEQ ID NO: 4, |
| | | WO2015121501 SEQ ID NO: 1 |
| AAV2 | 5067 | U.S. Pat. No. 6,156,303 SEQ ID NO: 8 |
| AAV2 | 5068 | US20030138772 SEQ ID NO: 7 |
| AAV2 | 5069 | U.S. Pat. No. 6,156,303 SEQ ID NO: 3 |
| AAVhE1.1 | 5070 | U.S. Pat. No. 9,233,131 SEQ ID NO: 44 |
| AAVhEr1.14 | 5071 | U.S. Pat. No. 9,233,131 SEQ ID NO: 46 |
| AAVhEr1.16 | 5072 | U.S. Pat. No. 9,233,131 SEQ ID NO: 48 |
| AAVhEr1.18 | 5073 | U.S. Pat. No. 9,233,131 SEQ ID NO: 49 |
| AAVhEr1.23 | 5074 | U.S. Pat. No. 9,233,131 SEQ ID NO: 53 |
| (AAVhEr2.29) | | |
| AAVhEr1.35 | 5075 | U.S. Pat. No. 9,233,131 SEQ ID NO: 50 |
| AAVhEr1.36 | 5076 | U.S. Pat. No. 9,233,131 SEQ ID NO: 52 |
| AAVhEr1.5 | 5077 | U.S. Pat. No. 9,233,131 SEQ ID NO: 45 |
| AAVhEr1.7 | 5078 | U.S. Pat. No. 9,233,131 SEQ ID NO: 51 |
| AAVhEr1.8 | 5079 | U.S. Pat. No. 9,233,131 SEQ ID NO: 47 |
| AAVhEr2.16 | 5080 | U.S. Pat. No. 9,233,131 SEQ ID NO: 55 |
| AAVhEr2.30 | 5081 | U.S. Pat. No. 9,23,3131 SEQ ID NO: 56 |
| AAVhEr2.31 | 5082 | U.S. Pat. No. 9,233,131 SEQ ID NO: 58 |
| AAVhEr2.36 | 5083 | U.S. Pat. No. 9,233,131 SEQ ID NO: 57 |
| AAVhEr2.4 | 5084 | U.S. Pat. No. 9,233,131 SEQ ID NO: 54 |
| AAVhEr3.1 | 5085 | U.S. Pat. No. 9,233,131 SEQ ID NO: 59 |
| AAV3 | 5086 | US20030138772 SEQ ID NO: 71, US20150159173 SEQ ID NO: |
| | | 28, US20160017295 SEQ ID NO: 3, U.S. Pat. No. 7,198,951 SEQ ID NO: 6 |
| AAV3 | 5087 | US20030138772 SEQ ID NO: 8 |
| AAV3a | 5088 | U.S. Pat. No. 6,156,303 SEQ ID NO: 5 |
| AAV3a | 5089 | U.S. Pat. No. 6,156,303 SEQ ID NO: 9 |
| AAV3b | 5090 | U.S. Pat. No. 6,156,303 SEQ ID NO: 6 |
| AAV3b | 5091 | U.S. Pat. No. 6,156,303 SEQ ID NO: 10 |
| AAV3b | 5092 | U.S. Pat. No. 6,156,303 SEQ ID NO: 1 |
| AAV4 | 5093 | US20140348794 SEQ ID NO: 17 |
| AAV4 | 5094 | US20140348794 SEQ ID NO: 5 |
| AAV4 | 5095 | US20140348794 SEQ ID NO: 3 |
| AAV4 | 5096 | US20140348794 SEQ ID NO: 14 |
| AAV4 | 5097 | US20140348794 SEQ ID NO: 15 |
| AAV4 | 5098 | US20140348794 SEQ ID NO: 19 |
| AAV4 | 5099 | US20140348794 SEQ ID NO: 12 |
| AAV4 | 5100 | US20140348794 SEQ ID NO: 13 |
| AAV4 | 5101 | US20140348794 SEQ ID NO: 7 |
| AAV4 | 5102 | US20140348794 SEQ ID NO: 8 |
| AAV4 | 5103 | US20140348794 SEQ ID NO: 9 |
| AAV4 | 5104 | US20140348794 SEQ ID NO: 2 |
| AAV4 | 5105 | US20140348794 SEQ ID NO: 10 |
| AAV4 | 5106 | US20140348794 SEQ ID NO: 11 |
| AAV4 | 5107 | US20140348794 SEQ ID NO: 18 |
| AAV4 | 5108 | US20030138772 SEQ ID NO: 63, US20160017295 SEQ ID NO: 4, |
| | | US20140348794 SEQ ID NO: 4 |
| AAV4 | 5109 | US20140348794 SEQ ID NO: 16 |
| AAV4 | 5110 | US20140348794 SEQ ID NO: 20 |
| AAV4 | 5111 | US20140348794 SEQ ID NO: 6 |
| AAV4 | 5112 | US20140348794 SEQ ID NO: 1 |
| AAV2.5T | 5113 | U.S. Pat. No. 9,233,131 SEQ ID NO: 42 |
| AAV5 | 5114 | US20160017295 SEQ ID NO: 5, U.S. Pat. No. 7,427,396 SEQ ID NO: 2, |
| | | US20150315612 SEQ ID NO: 216 |
| AAV5 | 5115 | US20150315612 SEQ ID NO: 199 |
| AAV6 | 5116 | US20150159173 SEQ ID NO: 13 |
| AAV6 | 5117 | US20030138772 SEQ ID NO: 65, US20150159173 SEQ ID NO: |
| | | 29, US20160017295 SEQ ID NO: 6, U.S. Pat. No. 6,156,303 SEQ ID NO: 7 |
| AAV6 | 5118 | U.S. Pat. No. 6,156,303 SEQ ID NO: 11 |
| AAV6 | 5119 | U.S. Pat. No. 6,156,303 SEQ ID NO: 2 |
| AAV6 | 5120 | US20150315612 SEQ ID NO: 203 |
| AAV7 | 5121 | US20150159173 SEQ ID NO: 14 |
| AAV7 | 5122 | US20150315612 SEQ ID NO: 183 |
| AAV7 | 5123 | US20030138772 SEQ ID NO: 2, US20150159173 SEQ ID NO: 30, |
| | | US20150315612 SEQ ID NO: 181, US20160017295 SEQ ID NO: 7 |
| AAV7 | 5124 | US20030138772 SEQ ID NO: 3 |
| AAV7 | 5125 | US20030138772 SEQ ID NO: 1, US20150315612 SEQ ID NO: 180 |
| AAV7 | 5126 | US20150315612 SEQ ID NO: 213 |
| AAV7 | 5127 | US20150315612 SEQ ID NO: 222 |
| AAV8 | 5128 | US20150159173 SEQ ID NO: 15 |
| AAV8 | 5129 | US20150376240 SEQ ID NO: 7 |
| AAV8 | 5130 | US20030138772 SEQ ID NO: 4, US20150315612 SEQ ID NO: 182 |
| AAV8 | 5131 | US20030138772 SEQ ID NO: 95, US20140359799 SEQ ID NO: 1, |
| | | US20150159173 SEQ ID NO: 31, US20160017295 SEQ ID NO: 8 |
| | | U.S. Pat. No. 7,198,951 SEQ ID NO: 7, US20150315612 SEQ ID NO: 223 |
| AAV8 | 5132 | US20150376240 SEQ ID NO: 8 |
| AAV8 | 5133 | US20150315612 SEQ ID NO: 214 |
| AAV9 | 5134 | US20030138772 SEQ ID NO: 5 |
| AAV9 | 5135 | U.S. Pat. No. 7,198,951 SEQ ID NO: 1 |
| AAV9 | 5136 | US20160017295 SEQ ID NO: 9 |
| AAV9 | 5137 | US20030138772 SEQ ID NO: 100, U.S. Pat. No. 7,198,951 SEQ ID NO: 2 |
| AAV9 | 5138 | U.S. Pat. No. 7,198,951 SEQ ID NO: 3 |
| AAAV (Avian | 5139 | U.S. Pat. No. 9,238,800 SEQ ID NO: 12 |
| AAV) | | |
| AAAV (Avian | 5140 | U.S. Pat. No. 9,238,800 SEQ ID NO: 2 |
| AAV) | | |
| AAAV (Avian | 5141 | U.S. Pat. No. 9,238,800 SEQ ID NO: 6 |
| AAV) | | |
| AAAV (Avian | 5142 | U.S. Pat. No. 9,238,800 SEQ ID NO: 4 |
| AAV) | | |
| AAAV (Avian | 5143 | U.S. Pat. No. 9,238,800 SEQ ID NO: 8 |
| AAV) | | |
| AAAV (Avian | 5144 | U.S. Pat. No. 9,238,800 SEQ ID NO: 14 |
| AAV) | | |
| AAAV (Avian | 5145 | U.S. Pat. No. 9,238,800 SEQ ID NO: 10 |
| AAV) | | |
| AAAV (Avian | 5146 | U.S. Pat. No. 9,238,800 SEQ ID NO: 15 |
| AAV) | | |
| AAAV (Avian | 5147 | U.S. Pat. No. 9,238,800 SEQ ID NO: 5 |
| AAV) | | |
| AAAV (Avian | 5148 | U.S. Pat. No. 9,238,800 SEQ ID NO: 9 |
| AAV) | | |
| AAAV (Avian | 5149 | U.S. Pat. No. 9,238,800 SEQ ID NO: 3 |
| AAV) | | |
| AAAV (Avian | 5150 | U.S. Pat. No. 9,238,800 SEQ ID NO: 7 |
| AAV) | | |
| AAAV (Avian | 5151 | U.S. Pat. No. 9,238,800 SEQ ID NO: 11 |
| AAV) | | |
| AAAV (Avian | 5152 | U.S. Pat. No. 9,238,800 SEQ ID NO: 13 |
| AAV) | | |
| AAAV (Avian | 5153 | U.S. Pat. No. 9,238,800 SEQ ID NO: 1 |
| AAV) | | |
| AAV Shuffle 100-1 | 5154 | US20160017295 SEQ ID NO: 23 |
| AAV Shuffle 100-1 | 5155 | US20160017295 SEQ ID NO: 11 |
| AAV Shuffle 100-2 | 5156 | US20160017295 SEQ ID NO: 37 |
| AAV Shuffle 100-2 | 5157 | US20160017295 SEQ ID NO: 29 |
| AAV Shuffle 100-3 | 5158 | US20160017295 SEQ ID NO: 24 |
| AAV Shuffle 100-3 | 5159 | US20160017295 SEQ ID NO: 12 |
| AAV Shuffle 100-7 | 5160 | US20160017295 SEQ ID NO: 25 |
| AAV Shuffle 100-7 | 5161 | US20160017295 SEQ ID NO: 13 |
| AAV Shuffle 10-2 | 5162 | US20160017295 SEQ ID NO: 34 |
| AAV Shuffle 10-2 | 5163 | US20160017295 SEQ ID NO: 26 |
| AAV Shuffle 10-6 | 5164 | US20160017295 SEQ ID NO: 35 |
| AAV Shuffle 10-6 | 5165 | US20160017295 SEQ ID NO: 27 |
| AAV Shuffle 10-8 | 5166 | US20160017295 SEQ ID NO: 36 |
| AAV Shuffle 10-8 | 5167 | US20160017295 SEQ ID NO: 28 |
| AAV SM 100-10 | 5168 | US20160017295 SEQ ID NO: 41 |
| AAV SM 100-10 | 5169 | US20160017295 SEQ ID NO: 33 |
| AAV SM 100-3 | 5170 | US20160017295 SEQ ID NO: 40 |
| AAV SM 100-3 | 5171 | US20160017295 SEQ ID NO: 32 |
| AAV SM 10-1 | 5172 | US20160017295 SEQ ID NO: 38 |
| AAV SM 10-1 | 5173 | US20160017295 SEQ ID NO: 30 |
| AAV SM 10-2 | 5174 | US20160017295 SEQ ID NO: 10 |
| AAV SM 10-2 | 5175 | US20160017295 SEQ ID NO: 22 |
| AAV SM 10-8 | 5176 | US20160017295 SEQ ID NO: 39 |
| AAV SM 10-8 | 5177 | US20160017295 SEQ ID NO: 31 |
| AAV5 | 5178 | U.S. Pat. No. 7,427,396 SEQ ID NO: 1 |
| AAV-8b | 5179 | US20150376240 SEQ ID NO: 5 |
| AAV-8b | 5180 | US20150376240 SEQ ID NO: 3 |
| AAV-8h | 5181 | US20150376240 SEQ ID NO: 6 |
| AAV-8h | 5182 | US20150376240 SEQ ID NO: 4 |
| AAVDJ | 5183 | US20140359799 SEQ ID NO: 3, U.S. Pat. No. 7,588,772 SEQ ID NO: 2 |
| AAVDJ | 5184 | US20140359799 SEQ ID NO: 2, U.S. Pat. No. 7,588,772 SEQ ID NO: 1 |
| AAVDJ-8 | 5185 | U.S. Pat. No. 7,588,772; Grimm et al 2008 |
| AAVDJ-8 | 5186 | U.S. Pat. No. 7,588,772; Grimm et al 2008 |
| AAV-LK01 | 5187 | US20150376607 SEQ ID NO: 2 |
| AAV-LK01 | 5188 | US20150376607 SEQ ID NO: 29 |
| AAV-LK02 | 5189 | US20150376607 SEQ ID NO: 3 |
| AAV-LK02 | 5190 | US20150376607 SEQ ID NO: 30 |
| AAV-LK03 | 5191 | US20150376607 SEQ ID NO: 4 |
| AAV-LK03 | 5192 | WO2015121501 SEQ ID NO: 12, US20150376607 SEQ ID NO: 31 |
| AAV-LK04 | 5193 | US20150376607 SEQ ID NO: 5 |
| AAV-LK04 | 5194 | US20150376607 SEQ ID NO: 32 |
| AAV-LK05 | 5195 | US20150376607 SEQ ID NO: 6 |
| AAV-LK05 | 5196 | US20150376607 SEQ ID NO: 33 |
| AAV-LK06 | 5197 | US20150376607 SEQ ID NO: 7 |
| AAV-LK06 | 5198 | US20150376607 SEQ ID NO: 34 |
| AAV-LK07 | 5199 | US20150376607 SEQ ID NO: 8 |
| AAV-LK07 | 5200 | US20150376607 SEQ ID NO: 35 |
| AAV-LK08 | 5201 | US20150376607 SEQ ID NO: 9 |
| AAV-LK08 | 5202 | US20150376607 SEQ ID NO: 36 |
| AAV-LK09 | 5203 | US20150376607 SEQ ID NO: 10 |
| AAV-LK09 | 5204 | US20150376607 SEQ ID NO: 37 |
| AAV-LK10 | 5205 | US20150376607 SEQ ID NO: 11 |
| AAV-LK10 | 5206 | US20150376607 SEQ ID NO: 38 |
| AAV-LK11 | 5207 | US20150376607 SEQ ID NO: 12 |
| AAV-LK11 | 5208 | US20150376607 SEQ ID NO: 39 |
| AAV-LK12 | 5209 | US20150376607 SEQ ID NO: 13 |
| AAV-LK12 | 5210 | US20150376607 SEQ ID NO: 40 |
| AAV-LK13 | 5211 | US20150376607 SEQ ID NO: 14 |
| AAV-LK13 | 5212 | US20150376607 SEQ ID NO: 41 |
| AAV-LK14 | 5213 | US20150376607 SEQ ID NO: 15 |
| AAV-LK14 | 5214 | US20150376607 SEQ ID NO: 42 |
| AAV-LK15 | 5215 | US20150376607 SEQ ID NO: 16 |
| AAV-LK15 | 5216 | US20150376607 SEQ ID NO: 43 |
| AAV-LK16 | 5217 | US20150376607 SEQ ID NO: 17 |
| AAV-LK16 | 5218 | US20150376607 SEQ ID NO: 44 |
| AAV-LK17 | 5219 | US20150376607 SEQ ID NO: 18 |
| AAV-LK17 | 5220 | US20150376607 SEQ ID NO: 45 |
| AAV-LK18 | 5221 | US20150376607 SEQ ID NO: 19 |
| AAV-LK18 | 5222 | US20150376607 SEQ ID NO: 46 |
| AAV-LK19 | 5223 | US20150376607 SEQ ID NO: 20 |
| AAV-LK19 | 5224 | US20150376607 SEQ ID NO: 47 |
| AAV-PAEC | 5225 | US20150376607 SEQ ID NO: 1 |
| AAV-PAEC | 5226 | US20150376607 SEQ ID NO: 48 |
| AAV-PAEC11 | 5227 | US20150376607 SEQ ID NO: 26 |
| AAV-PAEC11 | 5228 | US20150376607 SEQ ID NO: 54 |
| AAV-PAEC12 | 5229 | US20150376607 SEQ ID NO: 27 |
| AAV-PAEC12 | 5230 | US20150376607 SEQ ID NO: 51 |
| AAV-PAEC13 | 5231 | US20150376607 SEQ ID NO: 28 |
| AAV-PAEC13 | 5232 | US20150376607 SEQ ID NO: 49 |
| AAV-PAEC2 | 5233 | US20150376607 SEQ ID NO: 21 |
| AAV-PAEC2 | 5234 | US20150376607 SEQ ID NO: 56 |
| AAV-PAEC4 | 5235 | US20150376607 SEQ ID NO: 22 |
| AAV-PAEC4 | 5236 | US20150376607 SEQ ID NO: 55 |
| AAV-PAEC6 | 5237 | US20150376607 SEQ ID NO: 23 |
| AAV-PAEC6 | 5238 | US20150376607 SEQ ID NO: 52 |
| AAV-PAEC7 | 5239 | US20150376607 SEQ ID NO: 24 |
| AAV-PAEC7 | 5240 | US20150376607 SEQ ID NO: 53 |
| AAV-PAEC8 | 5241 | US20150376607 SEQ ID NO: 25 |
| AAV-PAEC8 | 5242 | US20150376607 SEQ ID NO: 50 |
| AAVrh.8R | 5243 | US20150159173, WO2015168666 SEQ ID NO: 9 |
| AAVrh.8R A586R | 5244 | WO2015168666 SEQ ID NO: 10 |
| mutant | | |
| AAVrh.8R R533A | 5245 | WO2015168666 SEQ ID NO: 11 |
| mutant | | |
| BAAV (bovine | 5246 | U.S. Pat. No. 9,193,769 SEQ ID NO: 11 |
| AAV) | | |
| BAAV (bovine | 5247 | U.S. Pat. No. 7,427,396 SEQ ID NO: 5 |
| AAV) | | |
| BAAV (bovine | 5248 | U.S. Pat. No. 7,427,396 SEQ ID NO: 6 |
| AAV) | | |
| BNP61 AAV | 5249 | US20150238550 SEQ ID NO: 1 |
| BNP61 AAV | 5250 | US20150238550 SEQ ID NO: 2 |
| BNP62 AAV | 5251 | US20150238550 SEQ ID NO: 3 |
| BNP63 AAV | 5252 | US20150238550 SEQ ID NO: 4 |
| caprine AAV | 5253 | U.S. Pat. No. 7,427,396 SEQ ID NO: 3 |
| caprine AAV | 5254 | U.S. Pat. No. 7,427,396 SEQ ID NO: 4 |
| true type AAV | 5255 | WO2015121501 SEQ ID NO: 2 |
| (ttAAV) | | |
| BAAV (bovine | 5256 | U.S. Pat. No. 9,193,769 SEQ ID NO: 8 |
| AAV) | | |
| BAAV (bovine | 5257 | U.S. Pat. No. 9,193,769 SEQ ID NO: 10 |
| AAV) | | |
| BAAV (bovine | 5258 | U.S. Pat. No. 9,193,769 SEQ ID NO: 4 |
| AAV) | | |
| BAAV (bovine | 5259 | U.S. Pat. No. 9,193,769 SEQ ID NO: 2 |
| AAV) | | |
| BAAV (bovine | 5260 | U.S. Pat. No. 9,193,769 SEQ ID NO: 6 |
| AAV) | | |
| BAAV (bovine | 5261 | U.S. Pat. No. 9,193,769 SEQ ID NO: 1 |
| AAV) | | |
| BAAV (bovine | 5262 | U.S. Pat. No. 9,193,769 SEQ ID NO: 5 |
| AAV) | | |
| BAAV (bovine | 5263 | U.S. Pat. No. 9,193,769 SEQ ID NO: 3 |
| AAV) | | |
| BAAV (bovine | 5264 | U.S. Pat. No. 9,193,769 SEQ ID NO: 7 |
| AAV) | | |
| BAAV (bovine | 5265 | U.S. Pat. No. 9,193,769 SEQ ID NO: 9 |
| AAV) | | |

[0490] Each of the patents, applications and/or publications listed in Table 5 are hereby incorporated by reference in their entirety.

[0491] General principles of rAAV production are reviewed in, for example, Carter, 1992, Current Opinions in Biotechnology, 1533-539; and Muzyczka, 1992, Curr. Topics in Microbial, and Immunol., 158:97-129). Various approaches are described in Ratschin et al., Mol. Cell. Biol. 4:2072 (1984); Hermonat et al., Proc. Natl. Acad. Sci. USA, 81:6466 (1984); Tratschin et al., Mol. Cell. Biol. 5:3251 (1985); McLaughlin et al., J. Virol., 62:1963 (1988); and Lebkowski et al., 1988 Mol. Cell. Biol., 7:349 (1988). Samulski et al. (1989, J. Virol., 63:3822-3828); U.S. Pat. No. 5,173,414; WO 95/13365 and corresponding U.S. Pat. No. 5,658,776; WO 95/13392; WO 96/17947; PCT/US98/18600; WO 97/09441 (PCT/US96/14423); WO 97/08298 (PCT/US96/13872); WO 97/21825 (PCT/US96/20777); WO 97/06243 (PCT/FR96/01064); WO 99/11764; Perrin et al. (1995) Vaccine 13:1244-1250; Paul et al. (1993) Human Gene Therapy 4:609-615; Clark et al. (1996) Gene Therapy 3:1124-1132; U.S. Pat. No. 5,786,211; U.S. Pat. No. 5,871,982, and U.S. Pat. No. 6,258,595, the contents of each of which are herein incorporated by reference in their entireties.

[0492] AAV vector serotypes can be matched to target cell types. For example, the following exemplary cell types can be transduced by the indicated AAV serotypes among others.

TABLE 6
Tissue/Cell Types and Serotypes

| Tissue/Cell Type | Serotype |
|---|---|
| Liver | AAV3, AAV8, AAV9 |
| Skeletal muscle | AAV1, AAV7, AAV6, AAV8, AAV9 |
| Central nervous system | AAV5, AAV1, AAV4 |
| RPE | AAV5, AAV4 |
| Photoreceptor cells | AAV5 |
| Lung | AAV9 |
| Heart | AAV8 |
| Pancreas | AAV8 |
| Kidney | AAV2 |

[0493] In addition to adeno-associated viral vectors, other viral vectors can be used. Such viral vectors include, but are not limited to, lentivirus, alphavirus, enterovirus, pestivirus, baculovirus, herpesvirus, Epstein Barr virus, papovavirusr, poxvirus, vaccinia virus, and herpes simplex virus.

[0494] In some cases, Cas9 mRNA, sgRNA targeting one or two loci in WAS gene, and donor DNA can each be separately formulated into lipid nanoparticles, or are all co-formulated into one lipid nanoparticle.

[0495] In some cases, Cas9 mRNA can be formulated in a lipid nanoparticle, while sgRNA and donor DNA can be delivered in an AAV vector.

[0496] Options are available to deliver the Cas9 nuclease as a DNA plasmid, as mRNA or as a protein. The guide RNA can be expressed from the same DNA, or can also be delivered as an RNA. The RNA can be chemically modified to alter or improve its half-life, or decrease the likelihood or degree of immune response. The endonuclease protein can be complexed with the gRNA prior to delivery. Viral vectors allow efficient delivery; split versions of Cas9 and smaller orthologs of Cas9 can be packaged in AAV, as can donors for HDR. A range of non-viral delivery methods also exist that can deliver each of these components, or non-viral and viral methods can be employed in tandem. For example, nano-particles can be used to deliver the protein and guide RNA, while AAV can be used to deliver a donor DNA.

### Genetically Modified Cells

[0497] The term “genetically modified cell” refers to a cell that has at least one genetic modification introduced by genome editing (e.g., using the CRISPR/Cas9/Cpf1 system). In some ex vivo examples herein, the genetically modified cell can be genetically modified progenitor cell. In some in vivo examples herein, the genetically modified cell can be a genetically modified liver cell. A genetically modified cell having an exogenous genome-targeting nucleic acid and/or an exogenous nucleic acid encoding a genome-targeting nucleic acid is contemplated herein.

[0498] The term “control treated population” describes a population of cells that has been treated with identical media, viral induction, nucleic acid sequences, temperature, confluency, flask size, pH, etc., with the exception of the addition of the genome editing components. Any method known in the art can be used to measure restoration of WAS gene or protein expression or activity, for example Western Blot analysis of the WAS protein or quantifying WAS gene mRNA.

[0499] The term “isolated cell” refers to a cell that has been removed from an organism in which it was originally found, or a descendant of such a cell. Optionally, the cell can be cultured in vitro, e.g., under defined conditions or in the presence of other cells. Optionally, the cell can be later introduced into a second organism or re-introduced into the organism from which it (or the cell from which it is descended) was isolated.

[0500] The term “isolated population” with respect to an isolated population of cells refers to a population of cells that has been removed and separated from a mixed or heterogeneous population of cells. In some cases, the isolated population can be a substantially pure population of cells, as compared to the heterogeneous population from which the cells were isolated or enriched. In some cases, the isolated population can be an isolated population of human progenitor cells, e.g., a substantially pure population of human progenitor cells, as compared to a heterogeneous population of cells having human progenitor cells and cells from which the human progenitor cells were derived.

[0501] The term “substantially enhanced,” with respect to a particular cell population, refers to a population of cells in which the occurrence of a particular type of cell is increased relative to pre-existing or reference levels, by at least 2-fold, at least 3-, at least 4-, at least 5-, at least 6-, at least 7-, at least 8-, at least 9, at least 10-, at least 20-, at least 50-, at least 100-, at least 400-, at least 1000-, at least 5000-, at least 20000-, at least 100000- or more fold depending, e.g., on the desired levels of such cells for ameliorating Wiskott-Aldrich Syndrome (WAS).

[0502] The term “substantially enriched” with respect to a particular cell population, refers to a population of cells that is at least about 10%, about 20%, about 30%, about 40%, about 50%, about 60%, about 70% or more with respect to the cells making up a total cell population.

[0503] The terms “substantially enriched” or “substantially pure” with respect to a particular cell population, refers to a population of cells that is at least about 75%, at least about 85%, at least about 90%, or at least about 95% pure, with respect to the cells making up a total cell population. That is, the terms “substantially pure” or “essentially purified.” with regard to a population of progenitor cells, refers to a population of cells that contain fewer than about 20%, about 15%, about 10%, about 9%, about 8%, about 7%, about 6%, about 5%, about 4%, about 3%, about 2%, about 1%, or less than 1%, of cells that are not progenitor cells as defined by the terms herein.

Differentiation of Genome-Edited iPSCs into Other Cell Types

[0504] Another step of the ex vivo methods of the present disclosure can have differentiating the genome-edited iPSCs into hepatocytes. The differentiating step can be performed according to any method known in the art. For example, hiPSC are differentiated into definitive endoderm using various treatments, including activin and B27 supplement (Life Technology). The definitive endoderm is further differentiated into hepatocyte, the treatment includes: FGF4, HGF, BMP2, BMP4, Oncostatin M, Dexametason, etc (Duan et al, STEM CELLS; 2010:28:674-686. Ma et al, STEM CELLS TRANSLATIONAL MEDICINE 2013; 2:409-419).

Differentiation of Genome-Edited Mesenchymal Stem Cells into Hepatocytes

[0505] Another step of the ex vivo methods of the present disclosure can have differentiating the genome-edited mesenchymal stem cells into hepatocytes. The differentiating step can be performed according to any method known in the art. For example, hMSC are treated with various factors and hormones, including insulin, transferrin. FGF4, HGF, bile acids (Sawitza I et al, Sci Rep. 2015; 5: 13320).

Implanting Cells into Patients

[0506] Another step of the ex vivo methods of the present disclosure can have implanting the hepatocytes into patients. This implanting step can be accomplished using any method of implantation known in the art. For example, the genetically modified cells can be injected directly in the patient's blood or otherwise administered to the patient.

[0507] Another step of the ex vivo methods of the disclosure involves implanting the progenitor cells or primary hepatocytes into patients. This implanting step may be accomplished using any method of implantation known in the art. For example, the genetically modified cells may be injected directly in the patient's liver or otherwise administered to the patient.

### IV. Dosing and Administration

[0508] The terms “administering,” “introducing” and “transplanting” are used interchangeably in the context of the placement of cells, e.g., progenitor cells, into a subject, by a method or route that results in at least partial localization of the introduced cells at a desired site, such as a site of injury or repair, such that a desired effect(s) is produced. The cells e.g., progenitor cells, or their differentiated progeny can be administered by any appropriate route that results in delivery to a desired location in the subject where at least a portion of the implanted cells or components of the cells remain viable. The period of viability of the cells after administration to a subject can be as short as a few hours, e.g., twenty-four hours, to a few days, to as long as several years, or even the life time of the patient, i.e., long-term engraftment. For example, in some aspects described herein, an effective amount of myogenic progenitor cells is administered via a systemic route of administration, such as an intraperitoneal or intravenous route.

[0509] The terms “individual,” “subject” and “host” are used interchangeably herein and refer to any subject for whom diagnosis, treatment or therapy is desired. In some aspects, the subject is a mammal. In some aspects, the subject is a human being. In some aspects, the subject is a human patient. In some aspects, the subject can have or is suspected of having WAS and/or has one or more symptoms of WAS. In some aspects, the subject being a human who is diagnosed with a risk of WAS at the time of diagnosis or later. In some cases, the diagnosis with a risk of WAS may be determined based on the presence of one or more mutations in the endogenous WAS gene or genomic sequence near the WAS gene in the genome.

[0510] When provided prophylactically, progenitor cells described herein can be administered to a subject in advance of any symptom of Wiskott-Aldrich Syndrome (WAS). Accordingly, the prophylactic administration of a progenitor cell population serves to prevent Wiskott-Aldrich Syndrome (WAS).

[0511] In some embodiments described herein, the progenitor cell population being administered according to the methods described herein can have allogeneic progenitor cells obtained from one or more donors. In some embodiments, the allogenic progenitor cells are hematopoietic progenitor cells. Such progenitors may be of any cellular or tissue origin, e.g., liver, muscle, cardiac, etc. “Allogeneic” refers to a progenitor cell or biological samples having progenitor cells obtained from one or more different donors of the same species, where the genes at one or more loci are not identical. For example, a liver progenitor cell population being administered to a subject can be derived from one more unrelated donor subjects, or from one or more non-identical siblings. In some cases, syngeneic progenitor cell populations can be used, such as those obtained from genetically identical animals, or from identical twins. The progenitor cells can be autologous cells; that is, the progenitor cells are obtained or isolated from a subject and administered to the same subject, i.e., the donor and recipient are the same.

[0512] The term “effective amount” refers to the amount of a population of progenitor cells or their progeny needed to prevent or alleviate at least one or more signs or symptoms of Wiskott-Aldrich Syndrome (WAS), and relates to a sufficient amount of a composition to provide the desired effect, e.g., to treat a subject having Wiskott-Aldrich Syndrome (WAS). The term “therapeutically effective amount” therefore refers to an amount of progenitor cells or a composition having progenitor cells that is sufficient to promote a particular effect when administered to a typical subject, such as one who has or is at risk for Wiskott-Aldrich Syndrome (WAS). An effective amount would also include an amount sufficient to prevent or delay the development of a symptom of the disease, alter the course of a symptom of the disease (for example but not limited to, slow the progression of a symptom of the disease), or reverse a symptom of the disease. It is understood that for any given case, an appropriate “effective amount” can be determined by one of ordinary skill in the art using routine experimentation.

[0513] For use in the various aspects described herein, an effective amount of progenitor cells has at least 10² progenitor cells, at least 5×10² progenitor cells, at least 10³ progenitor cells, at least 5×10³ progenitor cells, at least 10⁴ progenitor cells, at least 5×10⁴ progenitor cells, at least 10⁵ progenitor cells, at least 2×10⁵ progenitor cells, at least 3×10⁵ progenitor cells, at least 4×10⁵ progenitor cells, at least 5×10⁵ progenitor cells, at least 6×10⁵ progenitor cells, at least 7×10⁵ progenitor cells, at least 8×10⁵ progenitor cells, at least 9×10⁵ progenitor cells, at least 1×10⁶ progenitor cells, at least 2×10⁶ progenitor cells, at least 3×10⁶ progenitor cells, at least 4×10⁶ progenitor cells, at least 5×10⁶ progenitor cells, at least 6×10⁶ progenitor cells, at least 7×10⁶ progenitor cells, at least 8×10⁶ progenitor cells, at least 9×10⁶ progenitor cells, or multiples thereof. The progenitor cells can be derived from one or more donors, or can be obtained from an autologous source. In some examples described herein, the progenitor cells can be expanded in culture prior to administration to a subject in need thereof.

[0514] Modest and incremental increases in the levels of functional WAS protein expressed in cells of patients having Wiskott-Aldrich Syndrome (WAS) can be beneficial for ameliorating one or more symptoms of the disease, for increasing long-term survival, and/or for reducing side effects associated with other treatments. Upon administration of such cells to human patients, the presence of progenitors that are producing increased levels of functional WAS protein is beneficial. In some cases, effective treatment of a subject gives rise to at least about 3%, 5% or 7% functional WAS protein relative to total WAS protein in the treated subject. In some examples, functional WAS protein will be at least about 10% of total WAS gene. In some examples, functional WAS protein will be at least about 20% to 30% of total WAS protein. Similarly, the introduction of even relatively limited subpopulations of cells having significantly elevated levels of functional WAS protein can be beneficial in various patients because in some situations normalized cells will have a selective advantage relative to diseased cells. However, even modest levels of progenitors with elevated levels of functional WAS protein can be beneficial for ameliorating one or more aspects of Wiskott-Aldrich Syndrome (WAS) in patients. In some examples, about 10%, about 20%, about 30%, about 40%, about 50%, about 60%, about 70%, about 80%, about 90% or more of the liver progenitors in patients to whom such cells are administered are producing increased levels of functional WAS protein.

[0515] “Administered” refers to the delivery of a progenitor cell composition into a subject by a method or route that results in at least partial localization of the cell composition at a desired site. A cell composition can be administered by any appropriate route that results in effective treatment in the subject, i.e, administration results in delivery to a desired location in the subject where at least a portion of the composition delivered, i.e, at least 1×10⁴ cells are delivered to the desired site for a period of time.

[0516] In one aspect of the method, the pharmaceutical composition may be administered via a route such as, but not limited to, enteral (into the intestine), gastroenteral, epidural (into the dura matter), oral (by way of the mouth), transdermal, peridural, intracerebral (into the cerebrum), intracerebroventricular (into the cerebral ventricles), epicutaneous (application onto the skin), intradermal, (into the skin itself), subcutaneous (under the skin), nasal administration (through the nose), intravenous (into a vein), intravenous bolus, intravenous drip, intraarterial (into an artery), intramuscular (into a muscle), intracardiac (into the heart), intraosseous infusion (into the bone marrow), intrathecal (into the spinal canal), intraperitoneal, (infusion or injection into the peritoneum), intravesical infusion, intravitreal, (through the eye), intracavernous injection (into a pathologic cavity) intracavitary (into the base of the penis), intravaginal administration, intrauterine, extra-amniotic administration, transdermal (diffusion through the intact skin for systemic distribution), transmucosal (diffusion through a mucous membrane), transvaginal, insufflation (snorting), sublingual, sublabial, enema, eye drops (onto the conjunctiva), in ear drops, auricular (in or by way of the ear), buccal (directed toward the cheek), conjunctival, cutaneous, dental (to a tooth or teeth), electro-osmosis, endocervical, endosinusial, endotracheal, extracorporeal, hemodialysis, infiltration, interstitial, intra-abdominal, intra-amniotic, intra-articular, intrabiliary, intrabronchial, intrabursal, intracartilaginous (within a cartilage), intracaudal (within the cauda equine), intracisternal (within the cisterna magna cerebellomedularis), intracorneal (within the cornea), dental intracornal, intracoronary (within the coronary arteries), intracorporus cavernosum (within the dilatable spaces of the corporus cavernosa of the penis), intradiscal (within a disc), intraductal (within a duct of a gland), intraduodenal (within the duodenum), intradural (within or beneath the dura), intraepidermal (to the epidermis), intraesophageal (to the esophagus), intragastric (within the stomach), intragingival (within the gingivae), intraileal (within the distal portion of the small intestine), intralesional (within or introduced directly to a localized lesion), intraluminal (within a lumen of a tube), intralymphatic (within the lymph), intramedullary (within the marrow cavity of a bone), intrameningeal (within the meninges), intramyocardial (within the myocardium), intraocular (within the eye), intraovarian (within the ovary), intrapericardial (within the pericardium), intrapleural (within the pleura), intraprostatic (within the prostate gland), intrapulmonary (within the lungs or its bronchi), intrasinal (within the nasal or periorbital sinuses), intraspinal (within the vertebral column), intrasynovial (within the synovial cavity of a joint), intratendinous (within a tendon), intratesticular (within the testicle), intrathecal (within the cerebrospinal fluid at any level of the cerebrospinal axis), intrathoracic (within the thorax), intratubular (within the tubules of an organ), intratumor (within a tumor), intratympanic (within the aurus media), intravascular (within a vessel or vessels), intraventricular (within a ventricle), iontophoresis (by means of electric current where ions of soluble salts migrate into the tissues of the body), irrigation (to bathe or flush open wounds or body cavities), laryngeal (directly upon the larynx), nasogastric (through the nose and into the stomach), occlusive dressing technique (topical route administration which is then covered by a dressing which occludes the area), ophthalmic (to the external eye), oropharyngeal (directly to the mouth and pharynx), parenteral, percutaneous, periarticular, peridural, perineural, periodontal, rectal, respiratory (within the respiratory tract by inhaling orally or nasally for local or systemic effect), retrobulbar (behind the pons or behind the eyeball), intramyocardial (entering the myocardium), soft tissue, subarachnoid, subconjunctival, submucosal, topical, transplacental (through or across the placenta), transtracheal (through the wall of the trachea), transtympanic (across or through the tympanic cavity), ureteral (to the ureter), urethral (to the urethra), vaginal, caudal block, diagnostic, nerve block, biliary perfusion, cardiac perfusion, photopheresis and spinal.

[0517] Modes of administration include injection, infusion, instillation, and/or ingestion. “Injection” includes, without limitation, intravenous, intramuscular, intra-arterial, intrathecal, intraventricular, intracapsular, intraorbital, intracardiac, intradermal, intraperitoneal, transtracheal, subcutaneous, subcuticular, intraarticular, sub capsular, subarachnoid, intraspinal, intracerebro spinal, and intrasternal injection and infusion. In some examples, the route is intravenous. For the delivery of cells, administration by injection or infusion can be made.

[0518] The cells can be administered systemically. The phrases “systemic administration,” “administered systemically”, “peripheral administration” and “administered peripherally” refer to the administration of a population of progenitor cells other than directly into a target site, tissue, or organ, such that it enters, instead, the subject's circulatory system and, thus, is subject to metabolism and other like processes.

[0519] The efficacy of a treatment having a composition for the treatment of Wiskott-Aldrich Syndrome (WAS) can be determined by the skilled clinician. However, a treatment is considered “effective treatment,” if any one or all of the signs or symptoms of, as but one example, levels of functional WAS protein are altered in a beneficial manner (e.g., increased by at least 10%), or other clinically accepted symptoms or markers of disease are improved or ameliorated. Efficacy can also be measured by failure of an individual to worsen as assessed by hospitalization or need for medical interventions (e.g., progression of the disease is halted or at least slowed). Methods of measuring these indicators are known to those of skill in the art and/or described herein. Treatment includes any treatment of a disease in an individual or an animal (some non-limiting examples include a human, or a mammal) and includes: (1) inhibiting the disease, e.g., arresting, or slowing the progression of symptoms; or (2) relieving the disease, e.g., causing regression of symptoms; and (3) preventing or reducing the likelihood of the development of symptoms.

[0520] The treatment according to the present disclosure can ameliorate one or more symptoms associated with Wiskott-Aldrich Syndrome (WAS) by increasing, decreasing or altering the amount of functional WAS protein in the individual.

### V. Features and Properties of the Wiskott-Aldrich Syndrome Gene (was Gene)

[0521] In one embodiment, the gene may be the Wiskott-Aldrich syndrome gene (WAS gene) which may also be referred to as SCNX, THC1, THC, IMD2, Thrombocytopenia 1 (X-Linked), and Eczema-Thrombocytopenia. The WAS gene has a cytogenetic location of Xp11.23 and the genomic coordinate as seen on Ensemble are on Chromosome X on the forward strand at position 48,676,596-48,691,427. The nucleotide sequence of WAS gene is show n as SEQ ID NO: 5266. VN1R110P is the gene upstream of WAS gene on the forward strand and SUV39H1 is the gene downstream of WAS gene on the forward strand. The WAS gene has a NCBI gene ID of 7454, Uniprot ID of P42768 and Ensembl Gene ID of ENSG00000015285. The WAS gene has 559 SNPs, 29 intron sequences and 33 exon sequences. The exon ID from Ensembl and the start/stop sites of the introns and exons are shown in Table 7.

TABLE 7
Introns and Exons for WAS

| Exon No. | Exon ID | Start/Stop | Intron No. | Intron based on Exon ID | Start/Stop |
|---|---|---|---|---|---|
| Exon 1 | ENSE00001863155 | 48,689,020-48,689,066 | Intron 1 | Intron ENSE00001863155-ENSE00001862355 | 48,689,067-48,689,319 |
| Exon 2 | ENSE00001862355 | 48,689,320-48,689,594 | Intron 2 | Intron ENSE00001621913-ENSE00001608034 | 48,676,749-48,683,267 |
| Exon 3 | ENSE00001621913 | 48,676,596-48,676,748 | Intron 3 | Intron ENSE00001608034-ENSE00001700602 | 48,683,364-48,683,819 |
| Exon 4 | ENSE00001608034 | 48,683,268-48,683,363 | Intron 4 | Intron ENSE00001700602-ENSE00003539440 | 48,683,986-48,684,282 |
| Exon 5 | ENSE00001700602 | 48,683,820-48,683,985 | Intron 5 | Intron ENSE00003539440-ENSE00003612781 | 48,684,424-48,685,546 |
| Exon 6 | ENSE00003539440 | 48,684,283-48,684,423 | Intron 6 | Intron ENSE00003612781-ENSE00003547357 | 48,685,634-48,685,733 |
| Exon 7 | ENSE00003612781 | 48,685,547-48,685,633 | Intron 7 | Intron ENSE00003547357-ENSE00003544043 | 48,685,837-48,685,945 |
| Exon 8 | ENSE00003547357 | 48,685,734-48,685,836 | Intron 8 | Intron ENSE00003544043-ENSE00003543007 | 48,685,988-48,686,080 |
| Exon 9 | ENSE00003544043 | 48,685,946-48,685,987 | Intron 9 | Intron ENSE00003543007-ENSE00001703305 | 48,686,135-48,686,780 |
| Exon 10 | ENSE00003543007 | 48,686,081-48,686,134 | Intron 10 | Intron ENSE00001816247-ENSE00003606084 | 48,683,986-48,684,282 |
| Exon 11 | ENSE00001703305 | 48,686,781-48,686,871 | Intron 11 | Intron ENSE00003606084-ENSE00003460648 | 48,684,424-48,685,546 |
| Exon 12 | ENSE00001816247 | 48,683,828-48,683,985 | Intron 12 | Intron ENSE00003460648-ENSE00003502047 | 48,685,634-48,685,733 |
| Exon 13 | ENSE00003606084 | 48,684,283-48,684,423 | Intron 13 | Intron ENSE00003502047-ENSE00003601472 | 48,685,837-48,685,945 |
| Exon 14 | ENSE00003460648 | 48,685,547-48,685,633 | Intron 14 | Intron ENSE00003601472-ENSE00003584565 | 48,685,988-48,686,080 |
| Exon 15 | ENSE00003502047 | 48,685,734-48,685,836 | Intron 15 | Intron ENSE00003584565-ENSE00003535915 | 48,686,135-48,686,780 |
| Exon 16 | ENSE00003601472 | 48,685,946-48,685,987 | Intron 16 | Intron ENSE00003535915-ENSE00001953989 | 48,686,956-48,688,053 |
| Exon 17 | ENSE00003584565 | 48,686,081-48,686,134 | Intron 17 | Intron ENSE00001919437-ENSE00003601472 | 48,685,837-48,685,945 |
| Exon 18 | ENSE00003535915 | 48,686,781-48,686,955 | Intron 18 | Intron ENSE00003584565-ENSE00001863442 | 48,686,135-48,688,053 |
| Exon 19 | ENSE00001953989 | 48,688,054-48,688,198 | Intron 19 | Intron ENSE00001872072-ENSE00001936429 | 48,688,454-48,688,659 |
| Exon 20 | ENSE00001919437 | 48,685,779-48,685,836 | Intron 20 | Intron ENSE00001840524-ENSE00003606084 | 48,683,986-48,684,282 |
| Exon 21 | ENSE00001863442 | 48,688,054-48,688,146 | Intron 21 | Intron ENSE00003502047-ENSE00001861993 | 48,685,837-48,686,819 |
| Exon 22 | ENSE00001872072 | 48,688,279-48,688,453 | Intron 22 | Intron ENSE00001861993-ENSE00001869250 | 48,686,956-48,688,053 |
| Exon 23 | ENSE00001936429 | 48,688,660-48,688,999 | Intron 23 | Intron ENSE00001707442-ENSE00003539440 | 48,683,986-48,684,282 |
| Exon 24 | ENSE00001840524 | 48,683,819-48,683,985 | Intron 24 | Intron ENSE00003543007-ENSE00003599478 | 48,686,135-48,686,780 |
| Exon 25 | ENSE00001861993 | 48,686,820-48,686,955 | Intron 25 | Intron ENSE00003599478-ENSE00000332771 | 48,686,956-48,688,053 |
| Exon 26 | ENSE00001869250 | 48,688,054-48,688,137 | Intron 26 | Intron ENSE00000332771-ENSE00000669950 | 48,688,097-48,688,299 |
| Exon 27 | ENSE00001707442 | 48,683,779-48,683,985 | Intron 27 | Intron ENSE00000669950-ENSE00001255082 | 48,688,454-48,688,659 |
| Exon 28 | ENSE00003599478 | 48,686,781-48,686,955 | Intron 28 | Intron ENSE00001255082-ENSE00000867103 | 48,689,067-48,689,319 |
| Exon 29 | ENSE00000332771 | 48,688,054-48,688,096 | Intron 29 | Intron ENSE00000867103-ENSE00000867104 | 48,689,435-48,691,106 |
| Exon 30 | ENSE00000669950 | 48,688,300-48,688,453 | | | |
| Exon 31 | ENSE00001255082 | 48,688,660-48,689,066 | | | |
| Exon 32 | ENSE00000867103 | 48,689,320-48,689,434 | | | |
| Exon 33 | ENSE00000867104 | 48,691,107-48,691,427 | | | |

[0522] WAS gene has 559 SNPs and the NCBI rs number and/or UniProt VAR number for this WAS gene are VAR_005823, VAR_005825, VAR_005826, VAR_005827, VAR_005828, VAR_005829, VAR_005830, VAR_005831, VAR_005832, VAR_005833, rs146220228, VAR_005835, VAR_005836, VAR_005837, VAR_005838, VAR_005839, VAR_008105, VAR_008106, VAR_008106, VAR_008107, VAR_008108, VAR_008109, VAR_008110, VAR_012710, VAR_012711, VAR_022806, VAR_022807, VAR_033255, VAR_033256, VAR_033257, VAR_074020, rs192092, rs235422, rs235423, rs2735860, rs2737796, rs2737797, rs2737798, rs2737799, rs2737800, rs3215413, rs11545907, rs35351086, rs35359501, rs34164243, rs28379745, rs41298466, rs58371799, rs78375578, rs132630272, rs132630273, rs132630276, rs139857045, rs143825543, rs145072740, rs145299197, rs141722718, rs140238646, rs139265251, rs149941344, rs142231772, rs181677888, rs182012094, rs184380373, rs182671742, rs189073442, rs187071749, rs187207301, rs187614405, rs184217101, rs182475232, rs188698425, rs185865050, rs189579998, rs181475502, rs186835743, rs184064819, rs188356809, rs191 140821, rs180938515, rs201300703, rs368379103, rs150554260, rs150520117, rs149422306, rs181260434, rs182270501, rs368635575, rs150252581, rs371262569, rs375987005, rs149123892, rs373438606, rs201657175, rs144372473, rs149932808, rs369059472, rs148800063, rs141629445, rs371506803, rs141605347, rs191967655, rs143885622, rs138904063, rs191999320, rs376545922, rs376560886, rs143299151, rs145040665, rs200543049, rs376723243, rs140851093, rs369642443, rs369654974, rs139659302, rs374283590, rs372182723, rs193179881, rs139577358, rs112789098, rs132630275, rs377126493, rs132630274, rs132630271, rs132630270, rs132630269, rs132630268, rs138249592, rs370010448, rs370053372, rs377295134, rs372649110, rs57489208, rs377415721, rs374811059, rs59154508, rs377442612, rs55789731, rs370235898, rs370248054, rs187588147, rs201085962, rs185798380, rs186722885, rs189608406, rs375356111, rs387906716, rs387906717, rs190136544, rs188887707, rs587776742, rs368523950, rs587776744, rs587776745, rs201454882, rs781960144, rs781960751, rs371005311, rs781967249, rs371038390, rs371056209, rs190513631, rs376093906, rs373491815, rs373524969, rs781997651, rs200261212, rs782001600, rs782003647, rs376202818, rs369127837, rs371738193, rs371765089, rs782024402, rs374035804, rs192079438, rs781792192, rs200530781, rs200571645, rs374270583, rs781799471, rs369850591, rs374458439, rs781801746, rs781804991, rs782037639, rs267606468, rs374574436, rs782041200, rs782041815, rs781813385, rs193922412, rs782046601, rs782048178, rs193922413, rs193922414, rs781825719, rs193922415, rs782053989, rs193922416, rs781831613, rs781832180, rs199602285, rs370188924, rs372779500, rs781839366, rs781839950, rs367960760, rs375094923, rs782061167, rs368143764, rs781847394, rs368151220, rs375397970, rs375433190, rs782070061, rs587776743, rs781844097, rs782071252, rs781858831, rs781858910, rs375722538, rs781%65107, rs781969149, rs782080179, rs781866378, rs781970390, rs781971050, rs782085606, rs781980332, rs781985914, rs782088555, rs781988138, rs781879472, rs781880558, rs782001133, rs782095743, rs781884443, rs782004305, rs782006738, rs781887004, rs782010302, rs781790001, rs781790075, rs781893580, rs782105907, rs782106008, rs782024423, rs781897383, rs782107409, rs781898144, rs782109432, rs782028654, rs782029725, rs781903491, rs782114028, rs781904212, rs782115211, rs782117696, rs781798149, rs782198852, rs782422248, rs782199885, rs782423704, rs781799705, rs782430218, rs782204870, rs781918613, rs782699945, rs781920984, rs782032826, rs781808308, rs782706620, rs781809829, rs782436940, rs782136935, rs782137826, rs782046227, rs781927248, rs781821301, rs782711732, rs782214680, rs782712522, rs781930194, rs781930795, rs781823025, rs782053821, rs781931808, rs782715112, rs782218044, rs781932560, rs781829884, rs781932766, rs782056506, rs782148048, rs782148427, rs782057219, rs782060209, rs782451336, rs782149918, rs781840404, rs781840555, rs782073716, rs781848217, rs78206889, rs781854985, rs781939354, rs782226009, rs781855402, rs782227473, rs781856200, rs781860824, rs782462041, rs782728401, rs782076656, rs782082850, rs781868934, rs782730052, rs781945347, rs782087200, rs782165032, rs782087798, rs782730988, rs782466836, rs781877730, rs782468076, rs782235068, rs781948181, rs782169070, rs782093868, rs782237502, rs782736731, rs781952808, rs782174975, rs781885441, rs781886957, rs781954340, rs782099535, rs781889846, rs782102387, rs782484186, rs782106604, rs782486251, rs782244081, rs781901235, rs782454496, rs782224455, rs782156141, rs782185805, rs782745511, rs782158640, rs781942437, rs782727292, rs781943866, rs782163145, rs782752881, rs782730039, rs782195195, rs782753744, rs782198309, rs782164078, rs782233413, rs782166068, rs782257002, rs782502982, rs782236380, rs782175829, rs782760255, rs782739686, rs782741936, rs782761426, rs782742185, rs782508491, rs782764521, rs782264561, rs782181574, rs782768055, rs782267862, rs782515058, rs782270626, rs782271252, rs782517333, rs782484571, rs782274825, rs782775268, rs782525805, rs782280376, rs782526978, rs782527416, rs781902189, rs782285538, rs782286374, rs782784813, rs782533836, rs782290152, rs782290433, rs782789778, rs782792123, rs781910412, rs782298971, rs782299198, rs782793722, rs781917584, rs782133298, rs782706383, rs782707287, rs782439867, rs782301435, rs782301829, rs781928233, rs782303075, rs782303232, rs782303344, rs782445816, rs782798030, rs782798054, rs782714823, rs782546323, rs782305649, rs782307200, rs782716215, rs782448330, rs782549811, rs782550850, rs782550903, rs782149318, rs782809428, rs782809471, rs782314065, rs782810555, rs782555164, rs782316674, rs782816042, rs782817462, rs781934834, rs782559216, rs782320595, rs782451927, rs782563873, rs782328659, rs782566749, rs782452466, rs782152560, rs782335953, rs782336329, rs782337048, rs782572275, rs782575181, rs782575503, rs782244198, rs782487210, rs782578703, rs782185441, rs782347339, rs782488331, rs782582468, rs782584950, rs782355555, rs782587262, rs782489472, rs782489564, rs782246817, rs782247964, rs782363149, rs782595017, rs782350319, rs782596670, rs782587623, rs782602857, rs782593697, rs782370903, rs782594040, rs782594221, rs782605668, rs782607150, rs782363926, rs782611357, rs782615103, rs782249573, rs782616668, rs782498750, rs782381708, rs782256212, rs782256229, rs782628139, rs782501696, rs782387981, rs782503796, rs782259006, rs782504692, rs782636781, rs782761074, rs782639067, rs782392284, rs782507290, rs782641390, rs782767521, rs782517747, rs782281905, rs782655607, rs782656368, rs782401032, rs782659259, rs782666797, rs782666810, rs782405509, rs782406499, rs782578064, rs782347054, rs782672601, rs782677027, rs782793103, rs782681903, rs782682607, rs782683720, rs782414304, rs782542818, rs782415242, rs782686805, rs782794812, rs782420124, rs782543411, rs782543817, rs782543830, rs782544992, rs782303992, rs782798363, rs782802310, rs782803240, rs782553062, rs782818249, rs782559657, rs782567663, rs782334266, rs782343875, rs782366146, rs782370797, rs782605030, rs782605575, rs782375661, rs782615912, rs782380914, rs782383513, rs782384890, rs782386990, rs782388030, rs782631956, rs782634241, rs782638115, rs782640255, rs782643256, rs782645822, rs782397366, rs782670327, rs782672389, rs782681671, rs782415042, rs782693720, and rs782694766.

[0523] Wiskott-Aldrich Syndrome (WAS) is an X-linked primary immunodeficiency caused by mutations in the WAS gene. This disease is characterized by the classic triad of microthrombocytopenia, eczema, and recurrent infections. Besides the basic features, individuals with WAS are at high risk of developing autoimmune disorders and cancers (Massaad et al., 2013, Ann N Y Acad Sci; the contents of which are herein incorporated by reference in their entireties). WAS affects approximately 1-10 out of a million male births worldwide, with about 36 new cases every year in the United States and Europe. Without treatment, the average life expectancy is 15-20 years (Shin et al., 2012, Bone Marrow Transplant; the contents of which are herein incorporated by reference in their entireties).

[0524] X-Linked Thrombocytopenia (XLT) and X-Linked Neutropenia (XLN) are two milder forms of this disease. The defective nature of the WAS mutations correlates with the severity of the disease. While WAS is caused by mutations in the WAS gene that lead to absence of WAS protein (WASp), XLT is caused by mutations resulting in residual function of WASp and XLN is caused by gain-of-function mutations in the WAS gene. Patients with XLT present impaired platelet function and increased risk of severe bleedings, whereas patients with XLN present severe chronic neutropenia with varying levels of neutrophils.

[0525] The WAS gene contains 12 exons, spanning 14.8 kb of genomic DNA. The cDNA for WASp is 1.5 kb long. Mutations in WAS gene that lead to WAS are largely patient specific and spread across the whole gene (Massaad et al., 2013, Ann N Y Acad Sci; the contents of which are herein incorporated by reference in their entireties).

[0526] WASp is a 502 amino acid protein expressed exclusively in cytoplasm of hematopoietic cells. WASp alone exists in an auto-inhibited conformation and its activation is triggered upon binding of the small GTPase Cell Division Cycle 42 (CDC42) and Phosphatidylinositol-4,5-bisphosphate (PIP2). The activated WASp binds to and activates the Actin-Related Proteins 2/3 (Arp2/3) complex which stimulates actin polymerization by providing a nucleation core. The role of Arp2/3 complex in the regulation of actin cytoskeleton contributes to a variety of essential cellular functions including cell adhesion, shaping, and motility.

[0527] Absence of WASp expression leads to dysregulated functions in hematopoietic cells. In white blood cells, the lack of WASp signaling impairs cell movement and ability to form immune synapses at cellular interface with foreign invaders during an infection. This causes WAS patients to be highly susceptible to many bacterial, viral and fungal infections. Platelets that lack WASp have impaired development and early cell death, resulting in reduced platelet size and numbers. The platelet abnormality underlines the severe bleeding problems in WAS. Further, T cell functions are also defective due to the impaired ability to form stable immune synapses in T cell receptor dependent activation. This is a major cause of the immunodeficiency associated with WAS. In addition, absence of WASp in Natural Killer (NK) cells leads to reduced efficiency in phagocytosis and cell lysis, at normal or increased number of NK-cells in the body.

[0528] The only curative treatment for WAS is bone marrow transplantation (BMT). When a human leukocyte antigen (HLA)-matched donor is available, BMT can significantly improve survival up to 87% (Filipovich et al., 2001, Blood; the contents of which are herein incorporated by reference in their entireties). However, there is a shortage of HLA-matched donors and BMT often gives rise to acute or chronic graft-versus-host disease that can be life-threatening. Alternative therapies include splenectomy to increase and normalize the platelet counts, and prophylactic use of antibiotics and intravenous immunoglobulin to reduce the risk of infections. These treatments are only supportive and have limited long term effect.

[0529] Gene therapy is a promising alternative to BMT. The transplantation of autologous gene corrected CD34⁺ hematopoietic stem and progenitor cells (HSPCs) can lead to normal levels of functional white blood cells and platelets without the risk of graft-vs-host-disease and is independent from the availability of a matched donor. A number of clinical trials have been carried out for WAS in the past decade, and progress had been made (see reviews in Buchbinder et al., 2014, Appl Clin Genet; Martin et al., 2016, Expert Opin Orphan Drugs; Massaad et al., 2013, Ann N Y Acad Sci; the contents of each of which are herein incorporated by reference in their entireties). However, early studies relied on the use of retroviral or lentiviral vectors which are known to integrate randomly into the genome and cause undesirable mutations. For example, in the first clinical trial conducted with gammaretroviral vectors, 7 out of 10 patients developed leukemia due to retroviral integration near oncogenes (Braun et al., 2014, Sci Transl Med; the contents of which are herein incorporated by reference in their entireties).

[0530] Genome engineering is an emerging field that develops strategies and technologies for the precise manipulation of genes and genomes. Instead of relying on random insertions via integrative viral vectors, the use of recent genome engineering strategies, such as ZFNs, TALENs, HEs and MegaTALs, enables modifications only at desired locations, greatly improving efficiency and precision. Furthermore, random integration technologies offer little reproducibility, as there is no guarantee that the sequence would be inserted at the same place in two different cells. These newer platforms offer a much larger degree of reproducibility, but still have limitations.

[0531] HSPCs can be great target cells for gene therapy of WAS, as the introduction of a few gene-corrected HSPCs can restore all the hematopoietic lineages of the patients. Gene correction using the specific nucleases relies on the cellular repair mechanism of homologous directed repair (HDR). Although HSPCs are known to have low HDR frequency, some studies have managed to improve the efficiency by delivering the nuclease using mRNA nucleofection and favoring HDR by using nonintegrative lentiviral vectors to deliver the donor DNA (Genovese et al., 2014, Nature; Martin et al., 2016, Expert Opin Orphan Drugs, the contents of each of which are herein incorporated by reference in their entireties).

[0532] Despite advances in clinical care and medical research in WAS, there remains an unmet need for effective and safe treatments for WAS patients. The present disclosure presents a novel approach to correct the genetic causes of WAS and related disorders. By using this strategy, stable engraftment and physiological expression of WASp in blood cell lineages can be achieved. This approach can create permanent changes to the genome that can address the WAS gene related disorders and ultimately stop the progression of the disease.

### Genome Editing Strategy

### Knock-in Strategy

[0533] In one aspect, the present disclosure proposes insertion of a nucleic acid sequence of a WAS gene or functional derivative thereof into a genome of a cell. In embodiments, the WAS gene may encode a wild-type WAS protein. The functional derivative of a WAS gene may include a nucleic acid sequence encoding a functional derivative of the WAS protein that has a substantial activity of the wildtype WAS protein, e.g, at least about 30%, about 40%, about 50%, about 60%, about 70%, about 80%, about 90%, about 95% or about 100% of the activity that the wildtype WAS protein exhibits. In some embodiments, one having ordinary skill in the art can use a number of methods known in the field to test the functionality or activity of a compound, e.g. peptide or protein. Such methods may include, but not limited to, in vitro cell based assays as well as in vitro non-cell based assays such as measuring biding ARP2/3 complex with actin (see, e.g. Higgs H, and Pollard T D, “Regulation of Actin Polymerization by Arp2/3 Complex and Wasp/Scar Proteins,” (1999), The Journal of Biological Chemistry 274, 32531-32534 and Marchand J B et al., “Interaction of WASP/Scar proteins with actin and vertebrate Arp2/3 complex,” (2001). Nat Cell Biol. 3(1):76-82 which are incorporated by reference in entirety). The functional derivative of the WAS protein may also include any fragment of the wildtype WAS protein or fragment of a modified WAS protein that has conservative modification on one or more of amino acid residues in the full length, wildtype WAS protein. Thus, in some embodiments, the functional derivative of a nucleic acid sequence of a WAS gene may have at least about 30%, about 40%, about 50%, about 60%, about 70%, about 80%, about 85%, about 90%, about 95%, about 96%, about 97%, about 98% or about 99% nucleic acid sequence identity to the WAS gene.

[0534] In one aspect, the present disclosure proposes the use of CRISPR/Cas9 to genetically introduce (knock-in) the cDNA of the complete WAS-gene. As mutations are often scattered across the entire gene, this approach can cover the majority of patients.

[0535] In some embodiments, the genome of a cell can be edited by inserting a nucleic acid sequence of a WAS gene or functional derivative thereof into a genomic sequence of the cell. In some embodiments, the cell subject to the genome-edition has one or more mutation(s) in the genome which results in reduction of the expression of endogenous WAS gene as compared to the expression in a normal that does not have such mutation(s). The normal cell may be a healthy or control cell that is originated (or isolated) from a different subject who does not have WAS gene defects. In some embodiments, the cell subject to the genome-edition may be originated (or isolated) from a subject who is in need of treatment of WAS gene related condition or disorder. Therefore, in some embodiments the expression of endogenous WAS gene in such cell is about 10%, about 20%, about 30%, about 40%, about 50%, about 60%, about 70%, about 80%, about 90% or about 100% reduced as compared to the expression of endogenous WAS gene expression in the normal cell.

[0536] In some embodiments, the insertion of a nucleic acid sequence of a WAS gene or functional derivative thereof can be done by providing the following to the cell: a deoxyribonucleic acid (DNA) endonuclease or an oligonucleotide encoding the DNA endonuclease, a targeting oligonucleotide, and a donor template.

[0537] In embodiments, the DNA endonuclease is an enzyme selected from the group consisting of any of those in Table 1, Table 2, and variants having at least 70% homology to any of those listed in Table 1 or Table 2. In some embodiments, the DNA endonuclease is Cas 9. In embodiments, the oligonucleotide encoding the DNA endonuclease is codon optimized. In embodiments, the oligonucleotide encoding the DNA endonuclease is a deoxyribonucleic acid (DNA) sequence or a ribonucleic acid (RNA) sequence. In certain embodiments where the oligonucleotide encoding the DNA endonuclease is a RNA sequence, the RNA sequence can be linked to the targeting oligonucleotide via a covalent bond.

[0538] In embodiments, the targeting oligonucleotide has a region that is complementary to the genomic sequence at which a WAS gene or derivative thereof is inserted. In some embodiments, the complementary region is a spacer sequence that has at least 15 bases complementary to the genomic sequence targeted for insertion. In embodiments, the targeting oligonucleotide is a guide RNA (gRNA).

[0539] In embodiments, the genomic sequence that is targeted by the targeting oligonucleotide such as gRNA is at, within, or near the endogenous WAS gene. In some embodiments, the target site in the genome is in an intergenic region that is upstream of the promoter of the WAS gene in the genome. In certain embodiments, the intergenic region is at least 500 bp upstream of the first exon of the WAS gene. In certain embodiments, the intergenic region is about 500 bp upstream of the first exon of the WAS gene. In certain embodiments, the intergenic region is at least, about or at most 50, 100, 150, 200, 250, 300, 350, 400, 450 or 500 bp upstream of the WAS promoter or the first exon. In some embodiments, the target site is in an intergenic region that is upstream of the WAS gene, for example, at least, about or at most 0.1 kb, about 0.2 kb, about 0.3 kb, about 0.4 kb, about 0.5 kb, about 1 kb, about 1.5 kb, about 2 kb, about 2.5 kb, about 3 kb, about 3.5 kb, about 4 kb, about 4.5 kb or about 5 kb upstream of the WAS promoter or the first exon. In some embodiments, the target site is anywhere within about 0 bp to about 100 bp upstream, about 101 bp to about 200 bp upstream, about 201 bp to about 300 bp upstream, about 301 bp to about 400 bp upstream, about 401 bp to about 500 bp upstream, about 501 bp to about 600 bp upstream, about 601 bp to about 700 bp upstream, about 701 bp to about 800 bp upstream, about 801 bp to about 900 bp upstream, about 901 bp to about 1000 bp upstream, about 1001 bp to about 1500 bp upstream, about 1501 bp to about 2000 bp upstream, about 2001 bp to about 2500 bp upstream, about 2501 bp to about 3000 bp upstream, about 3001 bp to about 3500 bp upstream, about 3501 bp to about 4000 bp upstream, about 4001 bp to about 4500 bp upstream or about 4501 bp to about 5000 bp upstream of the WAS promoter or the first exon.

[0540] In some embodiments, the genomic sequence that is targeted by the targeting oligonucleotide such as gRNA is at, within, or near a safe harbor locus or a safe harbor site. In some embodiments, the safe-harbor locus is selected from the group consisting of albumin gene, an AAVS1 gene, an HRPT gene, a CCR5 gene, a globin gene, TTR gene, TF gene, F9 gene, Alb gene. Gys2 gene and PCSK9 gene. In some embodiments, the safe harbor site is selected from the group consisting of the following regions: AAVS1 19q13.4-qter, HRPT 1q31.2, CCR5 3p21.31, Globin 11p15.4, TTR 18q12.1, TF 3q22.1, F9 Xq27.1, Alb 4q13.3, Gys2 12p12.1, and PCSK9 1p32.3.

[0541] In some embodiments, the target site in the genome is at, within, or near the AAVS1 gene. In some other embodiments, the target site in the genome is upstream of the AAVS1 gene. In some embodiments, the target site is in an intergenic region that is upstream of the AAVS1 gene, e.g, about 2.5 kb upstream of the first exon of the AAVS1 gene. In some embodiments, the target site is in an intergenic region that is upstream of the AAVS1 gene, e.g, at least 2.5 kb upstream of the first exon of the AAVS1 gene. In some embodiments, the target site is in an intergenic region that is upstream of the AAVS1 gene, e.g, about 2.5 kb to about 5 kb upstream of the first exon of the AAVS1 gene. In some embodiments, the target site is in an intergenic region that is upstream of the AAVS1 gene, for example, about 2.5 kb to about 3 kb, about 2.5 kb to about 3.5 kb, about 2.5 kb to about 4 kb, about 2.5 kb to about 4.5 kb, about 2.5 kb to about 5 kb, about 2.5 kb to about 5.5 kb, about 2.5 kb to about 6 kb, about 2.5 kb to about 6.5 kb, about 2.5 kb to about 7 kb, about 2.5 kb to about 7.5 kb, about 2.5 kb to about 8 kb, about 2.5 kb to about 8.5 kb, about 2.5 kb to about 9 kb, about 2.5 kb to about 9.5 kb or about 2.5 kb to about 10 kb upstream of the first exon of the AAVS1 gene. In some embodiments, the target site is in an intergenic region that is upstream of the AAVS1 gene, for example, at least, about or at most 0.5 kb, about 1 kb, about 1.5 kb, about 2 kb, about 2.5 kb, about 3 kb, about 3.5 kb, about 4 kb, about 4.5 kb, about 5 kb, about 5.5 kb, about 6 kb, about 6.5 kb, about 7 kb, about 7.5 kb, about 8 kb, about 8.5 kb, about 9 kb, about 9.5 kb or about 10 kb upstream of the AAVS1 promoter or the first exon. In some embodiments, the target site is anywhere whtin about 0 bp to about 500 bp upstream, about 501 bp to about 1000 bp upstream, about 1001 bp to about 1500 bp upstream, about 1501 bp to about 2000 bp upstream, about 2001 bp to about 2500 bp upstream, about 2501 bp to about 3000 bp upstream, about 3001 bp to about 3500 bp upstream, about 3501 bp to about 4000 bp upstream, about 4001 bp to about 4500 bp upstream, about 4501 bp to about 5000 bp, about 5001 bp to about 5500 bp, about 5501 bp to about 6000 bp, about 6001 bp to about 6500 bp, about 6501 bp to about 7000 bp, about 7001 bp to about 7500 bp, about 7501 bp to about 8000 bp, about 8001 bp to about 8500 bp, about 8501 bp to about 9000 bp or about 9501 bp to about 10000 bp upstream of the AAVS1 promoter or the first exon.

[0542] In some embodiments, the target site in the genome is at, within, or near the AAVS1 gene. In some other embodiments, the target site in the genome is upstream of the AAVS1 gene encompassing nucleotides 55,120,000 to 55,122,500 on chromosome 19.

[0543] In some embodiments, the donor template can have a WAS cDNA sequence or a derivative thereof. The derivative of a WAS gene may include a nucleic acid sequence that encodes a functional derivative of the wildtype WAS protein or fragment thereof. In some embodiments, the donor template can have additional element(s) such as one or more regulatory sequences and reporter genes. The regulatory sequences and reporter genes are optional and used when needed in that in some embodiments such optional sequences may not be present in the donor template.

[0544] In some embodiments, the donor template can have a promoter sequence for the expression of the introduced WAS gene or derivative thereof. In some embodiments, the promoter can be a WAS proximal promoter, WAS distal promoter or MND synthetic promoter. In alternative embodiments, other eukaryotic promoters can be and such suitable eukaryotic promoters (i.e., promoters functional in a eukaryotic cell) can include, but not limited to, those from cytomegalovirus (CMV) immediate early, herpes simplex virus (HSV) thymidine kinase, early and late SV40, long terminal repeats (LTRs) from retrovirus, human elongation factor-1 promoter (EF1), a hybrid construct having the cytomegalovirus (CMV) enhancer fused to the chicken beta-actin promoter (CAG), murine stem cell virus promoter (MSCV), phosphoglycerate kinase-1 locus promoter (PGK), and mouse metallothionein-1 promoter.

[0545] In some embodiments, the donor template does not have a promoter for the expression of the introduced WAS gene or functional derivative thereof. Therefore, in such embodiments, the transgene expression is controlled by an endogenous promoter that is present at, within, or near the targeted genomic sequence. In some embodiments, the endogenous promoter is the endogenous WAS promoter.

[0546] In some embodiments, one or more of any oligonucleotides or nucleic acid sequences that are provided to the cell for genome-edition can be encoded in an Adeno Associated Virus (AAV) vector. Therefore, in some embodiments, a targeting oligonucleotide can be encoded in an AAV vector. In some embodiments, a nucleic acid encoding a DNA endonuclease can be encoded in an AAV vector. In some embodiments, a donor template can be encoded in an AAV vector. In some embodiments, two or more oligonucleotides or nucleic acid sequences can be encoded in a single AAV vector. Thus, in some embodiments, a gRNA sequence and a DNA endonuclease-encoding nucleic acid can be encoded in a single AAV vector.

[0547] In some embodiments, any compounds (e.g, a DNA endonuclease or a nucleic acid encoding thereof, gRNA and donor template) that are provided to the cell for genome-edition can be formulated in a liposome or lipid nanoparticle. In some embodiments, one or more such compounds are associated with a liposome or lipid nanoparticle via a covalent bond or non-covalent bond. In some embodiments, any of the compounds can be separately or together contained in a liposome or lipid nanoparticle. Therefore, in some embodiments, each of a DNA endonuclease or a nucleic acid encoding thereof, gRNA and donor template is separately formulated in a liposome or lipid nanoparticle. In some embodiments, a DNA endonuclease is formulated in a liposome or lipid nanoparticle with gRNA. In some embodiments, a DNA endonuclease or a nucleic acid encoding thereof, gRNA and donor template are formulated in a liposome or lipid nanoparticle together.

[0548] In some embodiments, any compounds (e.g, a DNA endonuclease or a nucleic acid encoding thereof, gRNA and donor template) that are provided to the cell for genome-edition can be delivered via transfection such as electroporation. In some exemplary embodiments, a DNA endonuclease can be precomplexed with a gRNA, forming a Ribonucleoprotein (RNP) complex, prior to the provision to the cell and the RNP complex can be electroporated. In such embodiments, the donor template can delivered via electroporation.

[0549] In some embodiments, the cell subject to the genome-edition may have one or more mutation(s) at, within, or near the endogenous WAS gene in the genome. Therefore, in some embodiments the expression of endogenous WAS gene or activity of WAS gene products in such cell is substantially less as compared to those of a normal, healthy cell, e.g, at least the about 10% to about 100% reduction as compared to the normal cell. Upon successful insertion of the transgene, e.g, a nucleic acid encoding a WAS gene or functional fragment thereof, the expression of the introduced WAS gene or functional derivative thereof in the cell can be at least about 10%, about 20%, about 30%, about 40%, about 50%, about 60%, about 70%, about 80%, about 90%, about 100%, about 200%, about 300%, about 400%, about 500%, about 600%, about 700%, about 800%, about 900%, about 1,000%, about 2,000%, about 3,000%, about 5,000%, about 10,000% or more as compared to the expression of endogenous WAS gene of the cell. In some embodiments, the activity of introduced WAS gene products including the functional fragment of WAS in the genome-edited cell can be at least about 10%, about 20, about 30%, about 40%, about 50%, about 60%, about 70%, about 80%, about 90%, about 100%, about 200%, about 300%, about 400%, about 500%, about 600%, about 700%, about 800%, about 900%, about 1,000%, about 2,000%, about 3,000%, about 5,000%, about 10.000% or more as compared to the expression of endogenous WAS gene of the cell. In some embodiments, the expression of the introduced WAS gene or functional derivative thereof in the cell is at least about 2 folds, about 3 folds, about 4 folds, about 5 folds, about 6 folds, about 7 folds, about 8 folds, about 9 folds, about 10 folds, about 15 folds, about 20 folds, about 30 folds, about 50 folds, about 100 folds or more of the expression of endogenous WAS gene of the cell. Also, in some embodiments, the activity of introduced WAS gene products including the functional fragment of WAS in the genome-edited cell can be comparable to or more than the activity of WAS gene products in a normal, healthy cell.

[0550] In some embodiments, the cell subject to the genome-edition is a stem cell. In some embodiments, the stem cell is a CD34+ hematopoietic stem and progenitor cell (HSPC). In some embodiments, the stem cell is an induced pluripotent stem cell (iPSC). In some embodiments, the stem cell is a mesenchymal stem cell.

[0551] In some embodiments, two guide RNAs specific for the cleavage site can be delivered together with a cDNA template containing homology sequences. The two guide RNAs will delete the mutated region and the cDNA will be introduced directly downstream of the physiological promotor. The knock-in will be achieved by cellular repair mechanism of HDR. The best position for cleavage will be assessed experimentally in order to obtain translated, non-toxic proteins. The Cas9 nuclease can be delivered as a protein or as nucleic acids (mRNA or DNA), whereas the guide RNAs can be delivered as RNA or co-expressed with the same DNA as the Cas9. The delivery to the cells can be viral or non-viral, e.g, nanoparticles for the protein Cas9 and mRNA together with an AAV for the DNA donor template.

### Alternative Strategies

[0552] In some embodiments, alternative strategies such as 1) correcting, by insertions or deletions that arise due to the imprecise NHEJ pathway, one or more mutations at, within, or near the WAS gene or other DNA sequences that encode regulatory elements of the WAS gene or 2) correcting, by HDR, one or more mutations at, within, or near the WAS gene or other DNA sequences that encode regulatory elements of the WAS gene can be employed to alter the expression of WAS in a cell via genome-edition.

[0553] In some embodiments, the treatment method may target hematopoietic stem and progenitor cells (HSPCs) for therapeutic gene editing. HSPCs are an important target for gene therapy as they provide a prolonged source of the corrected cells. HSCs give rise to both the myeloid and lymphoid lineages of blood cells. Mature blood cells have a finite life-span and must be continuously replaced throughout life. Blood cells are continually produced by the proliferation and differentiation of a population of pluripotent hematopoietic stem cells (HSCs) that can be replenished by self-renewal. Bone marrow is the major site of hematopoiesis in humans and a good source for HSPCs. HSPCs can be found in small numbers in the peripheral blood. In some indications or treatments their numbers increase. The progenies of HSCs mature through stages, generating multi-potential and lineage-committed progenitor cells including T- and B-cells. Edited cells, such as CD34+ HSPCs would be returned to the patient.

### Ex Vivo Delivery

[0554] Ex vivo delivery method can be used for delivery of CRISPR/Cas9 to cells. This method has the steps of 1) isolate CD34+ HSPCs from the patient; 2) editing at, within, or near the WAS gene or other DNA sequences that encode the regulatory elements of the WAS gene of the HSCs from the patient; and 3) reinfuse the HSPCs into the patient. Transplantation requires clearance of bone-marrow niches for the donor HSPCs to engraft. Current methods rely on radiation and/or chemotherapy. Due to the limitations these impose, safer conditioning regimens have been developed. Success of HSPC transplantation depends upon efficient homing to bone marrow, subsequent engraftment, and bone marrow repopulation. In some embodiments, hematopoietic stem cells (HSCs) are an important target for ex vivo gene therapy as they provide a prolonged source of the corrected cells. Treated CD34+ cells would be returned to the patient. The level of engraftment is important, as is the ability of the gene-edited cells to differentiate into all lineages following CD34+ HSPCs infusion in vivo.

[0555] In one aspect, the disclosures provide a method of treating a subject for a Wiskott-Aldrich syndrome (WAS) gene related condition or disorder via an ex vivo approach. The method may have providing a genetically modified cell to the subject. The genome of the genetically modified cell may have been edited such that an exogenous nucleic acid sequence of a WAS gene or functional derivative thereof is inserted in the genome.

[0556] In some embodiments, the subject who is in need of the treatment method accordance with the disclosures is a patient having symptoms of the Wiskott-Aldrich syndrome (WAS) gene related condition or disorder. Alternatively, the subject can be a human diagnosed with a risk of the Wiskott-Aldrich syndrome (WAS) gene related condition or disorder.

[0557] In some embodiments, the genetically modified cell that is used for the treatment is originated from the subject who is in need of the treatment method according to the disclosure. Therefore, in some embodiments, the genetically modified cell originated from a subject has one or more mutation(s) in the genome which results in reduction of the expression of endogenous WAS gene as compared to the expression of endogenous WAS gene in a normal cell that does not have such mutation(s). In some embodiments, such mutation(s) are present at, within, or near the endogenous WAS gene in the genome. Due to such mutation, in some embodiments, the expression of endogenous WAS gene in the subject-originated cell is about 10%, about 20%, about 30%, about 40%, about 50%, about 60%, about 70%, about 80%, about 90% or about 100% reduced as compared to the expression of endogenous WAS gene expression in a normal cell that does not have such mutation(s).

[0558] In some embodiments, the genetically modified cell originated from a subject has one or more mutation(s) in the genome which results in reduction of the expression of functional endogenous WAS gene as compared to the expression of functional endogenous WAS gene in a normal cell that does not have such mutation(s). In some embodiments, such mutation(s) are present at, within, or near the endogenous WAS gene in the genome. Due to such mutation, in some embodiments, the expression of functional endogenous WAS gene in the subject-originated cell is about 10%, about 20%, about 30%, about 40%, about 50%, about 60%, about 70%, about 80%, about 90% or about 100% reduced as compared to the expression of functional endogenous WAS gene expression in a normal cell that does not have such mutation(s).

[0559] In some embodiments, one or more cells are isolated from a subject who is in need of the treatment according to the disclosure and the cells are modified. The modification may include a genome-edition which is done by inserting a WAS gene or derivative thereof into the genome of the cell. With this modification, the expression of the introduced WAS gene or functional derivative thereof in the genetically modified cell can be at least about 10%, about 20%, about 30%, about 40%, about 50%, about 60%, about 70%, about 80%, about 90%, about 100%, about 200%, about 300%, about 400%, about 500%, about 600%, about 700%, about 800%, about 900%, about 1,000%, about 2,000%, about 3.000%, about 5,000%, about 10,000% or more as compared to the expression of endogenous WAS gene of the cell. In some embodiments, the activity of introduced WAS gene products including the functional fragment of WAS in the genome-edited (or genetically modified) cell can be at least about 10%, about 20%, about 30%, about 40%, about 50%, about 60%, about 70%, about 80%, about 90%, about 100%, about 200%, about 300%, about 400%, about 500%, about 600%, about 700%, about 800%, about 900%, about 1,000%, about 2,000%, about 3,000%, about 5,000%, about 10,000% or more as compared to the expression of endogenous WAS gene of the cell. In some embodiments, the expression of the introduced WAS gene or functional derivative thereof in the genetically modified cell is at least about 2 folds, about 3 folds, about 4 folds, about 5 folds, about 6 folds, about 7 folds, about 8 folds, about 9 folds, about 10 folds, about 15 folds, about 20 folds, about 30 folds, about 50 folds, about 100 folds or more of the expression of endogenous WAS gene of the cell. Also, in some embodiments, the activity of introduced WAS gene products including the functional fragment of WAS in the genome-edited cell can be comparable to or more than the activity of WAS gene products in a normal, healthy cell.

[0560] In some embodiments, the cell subject to the genome-edition is a stem cell. In some embodiments, the stem cell is a CD34+ hematopoietic stem and progenitor cell (HSPC). In some embodiments, the stem cell is an induced pluripotent stem cell (iPSC). In some embodiments, the stem cell is a mesenchymal stem cell.

[0561] In some embodiments, the treatment method in accordance with the disclosure may also include a process of producing a genetically modified cell. The production process may include isolating a cell from the subject who is in need of the treatment and editing the genome of the cell by inserting the exogenous nucleic acid sequence of a WAS gene or functional derivative thereof into a genomic sequence of the cell. In some embodiments, the isolated cell is a somatic cell and the method further has introducing one or more of pluripotency-associated genes into the somatic cell to induce the somatic cell to become a pluripotent stem cell. In some embodiments, the pluripotency-associated genes are selected from the group consisting of OCT4, SOX1, SOX2, SOX3, SOX15, SOX18, NANOG, KLF1, KLF2, KLF4, KLF5, c-MYC, n-MYC, REM2, TERT and LIN28.

[0562] In some embodiments, the exogenous nucleic acid sequence (or transgene) of a WAS or functional derivative thereof is inserted at, within, or near the endogenous WAS gene or WAS gene regulatory elements in the genome of the cell. In some embodiments, the exogenous nucleic acid sequence or transgene is inserted in an intergenic region that is upstream of the promoter of the WAS gene in the genome. In certain embodiments, the intergenic region is about 500 bp upstream of the first exon of the WAS gene. In certain embodiments, the intergenic region is at least 500 bp upstream of the first exon of the WAS gene.

[0563] In some embodiments, the exogenous nucleic acid sequence or transgene is inserted at, within, or near a safe harbor locus or a safe harbor site. In some embodiments, the safe-harbor locus is selected from the group consisting of albumin gene, an AAVS1 gene, an HRPT gene, a CCR5 gene, a globin gene, TTR gene, TF gene, F9 gene, Alb gene, Gys2 gene and PCSK9 gene. In some embodiments, the safe harbor site is selected from the group consisting of the following regions: AAVS119q13.4-qter, HRPT 1q31.2, CCR5 3p21.31, Globin 11p15.4, TTR 18q12.1. TF 3q22.1, F9 Xq27.1, Alb 4q13.3, Gys2 12p12.1 and PCSK9 1p32.3. In some embodiments, the exogenous nucleic acid sequence or transgene is inserted at, within, or near the AAVS1 gene. In some embodiments, the exogenous nucleic acid sequence or transgene is inserted upstream of the AAVS1 gene, in particular an intergenic region that is at least or about 2.5 kb upstream of the first exon of the AAVS1 gene.

### In Vive Delivery

[0564] In vivo delivery method can also be used for delivery of CRISPR/Cas9 to cells. This method has the step of editing the WAS gene in a cell of the patient. Although blood cells present an attractive target for ex vivo therapy, increased efficacy in delivery may permit direct in vivo delivery to the HSCs and/or other progenitors such as CD34+ HSPCs. In vivo treatment would eliminate a number of treatment steps and losses associated with ex vivo treatment and engraftment. However, a lower rate of delivery may require higher rates of editing. Unwanted Cas9 mediated cleavage in cells other than the target cells may be prevented by the use of promotors that are cell type-specific or development stage specific. Alternatively, the promotors can be inducible, allowing for temporal control of Cas9 expression if it is delivered as a plasmid. The amount of time that delivered RNA and protein remain in the cell can also be adjusted by modifying the RNA or protein to modulate the half-life.

### Development Plan

[0565] In order to minimize off-target cleavage to reduce the detrimental effects of mutations and chromosomal rearrangements, bioinformatics can be used. Studies on CRISPR/Cas9 systems suggested the possibility of high off-target activity due to nonspecific hybridization of the guide strand to DNA sequences with base pair mismatches and/or bulges, particularly at positions distal from the PAM region (Cradick et al., 2013, Nucleic Acids Res: Hsu et al., 2013, Nat. Biotechnol; Fu et al., 2013, Nat. Biotechnol; Lin et al., 2014, Nucleic Acids Res; the contents of each of which are herein incorporated by reference in their entireties). It is therefore important to have a bioinformatics tool that can identify potential off-target sites that have insertions and/or deletions between the RNA guide strand and genomic sequences, in addition to base-pair mismatches. The bioinformatics based tool (e.g. software), COSMID (CRISPR Off-target sites with Mismatches, Insertions and Deletions), autoCOSMID or ccTOP (https://crispr.cos.uni-heidelberg.de/) can be used to search genomes for potential CRISPR off-target-sites (http://crispr.bme.gatech.edu). COSMID output ranked lists of the potential off-target sites based in the number and location of mismatches, allowing more informed choice of target sites and avoiding the use of sites with more likely off-target cleavage. Additional bioinformatics pipelines can be employed that weigh the estimated on- and/or off-target activity of gRNA targeting sites in a region. Other features that may be used to predict activity include information about the cell type in question, DNA accessibility, chromatin state, transcription factor binding sites, transcription factor binding data and other CHIP-seq data. Additional factors are weighed that predict editing efficiency such as relative positions and directions of the gRNA, local sequence features and micro-homologies (Bae et al., 2014, Nat. Methods; Prykhozhij et al., 2015, Plos One; Naito et al., 2015, Bioinformatics; Stemmer et al., 2015, Plos One; the contents of each of which are herein incorporated by reference in their entireties).

[0566] The various constructs can be screened for activity and specificity via transfection of tissue cultures (Cradick et al., 2014, Mol Ther Nucleic Acids; the contents of which are herein incorporated by reference in their entireties). Tissue culture cell lines, such as K-562 or 293T are easily transfected and result in high activity. These or other cell lines are evaluated to determine the cell lines that provide the best surrogate. These cells are then used for many early stage tests. Individual gRNAs will be transfected into the cells. Several days later the genomic DNA is harvested and the target site amplified by PCR. The cutting activity can be measured by the rate of insertions, deletions and mutations introduced by NHEJ repair of the free DNA ends. Although this method cannot differentiate correctly repaired sequences from uncleaved DNA, the level of cutting can be gauged by the amount of mis-repair. Off-target activity can be observed by amplifying identified putative off-target sites and using similar methods to detect cleavage. Translocation can also be assayed using primers flanking cut sites, to determine if specific cutting and translocations happen. Un-guided assays have been developed allowing complementary testing of off-target cleavage including guide-seq (Kim et al., 2015, Nat. Methods; Frock et al., 2015, Nat. Biotechnol; Kuscu et al., 2014, Nat. Biotechnol; the contents of which are herein incorporated by reference in their entireties). The gRNA with significant activity can then be followed up in cultured cells to measure the silencing of the WAS gene. The off-target effects can also be followed. Similarly, CD34+ HSPCs can be transfected and the level of gene correction and possible off-target events measured. These experiments allow for the optimization of nuclease and donor design and delivery.

[0567] Mouse models can be used in gene therapy studies to measure activity when targeting mutations in the similar mouse WAS gene. These studies are useful for the determination of the levels of correction needed. Animal models can also be used to test the levels of correction expected to result in phenotypic correction, as dose curves of wild-type (WT) cells can also be transferred to the knockout animal. Specificity and safety can be assayed in mouse models, though the differences between the genomes limit these to be surrogate studies only. Culture in human cells allows direct testing on the human target and the background human genome, as described above. Preclinical efficacy and safety evaluations can be observed through engraftment of modified mouse or human CD34+ HPSCs in a WAS− mouse model or similar mice.

[0568] The gene editing approach presented in the present disclosure would result in developing B- and T-cells in central lymphoid organs and in the appearance of B- and T-cells in peripheral blood. Serum Ig levels can be measured and compared to the range found in patients without immunodeficiencies. Ig and TCR Vβ gene segment usage in B- and T-cells, respectively, should be comparable to WT controls. Animal models have indicated that even low frequencies of B cells produced WT levels of serum immunoglobulins. T cell function can be assayed through TCR stimulation and cytokine measurement and compared to WT levels. Correction of platelet function can be evaluated through total platelet count, evaluation of platelet phenotype and measurement of clotting times. Clinical testing would include long term following of modified B- and T-cells to determine if there are any resulting growth abnormalities or signs of oncogene activation.

### VI. Other Therapeutic Approaches

[0569] Gene editing can be conducted using nucleases engineered to target specific sequences. To date there are four major types of nucleases: meganucleases and their derivatives, zinc finger nucleases (ZFNs), transcription activator like effector nucleases (TALENs), and CRISPR-Cas9 nuclease systems. The nuclease platforms vary in difficulty of design, targeting density and mode of action, particularly as the specificity of ZFNs and TALENs is through protein-DNA interactions, while RNA-DNA interactions primarily guide Cas9. Cas9 cleavage also requires an adjacent motif, the PAM, which differs between different CRISPR systems. Cas9 from Streptococcus pyogenes cleaves using a NGG PAM, CRISPR from Neisseria meningitidis can cleave at sites with PAMs including NNNNGATT, NNNNNGTTT and NNNNGCTT. A number of other Cas9 orthologs target protospacer adjacent to alternative PAMs.

[0570] CRISPR endonucleases, such as Cas9, can be used in the methods of the present disclosure. However, the teachings described herein, such as therapeutic target sites, could be applied to other forms of endonucleases, such as ZFNs, TALENs, HEs, or MegaTALs, or using combinations of nulceases. However, in order to apply the teachings of the present disclosure to such endonucleases, one would need to, among other things, engineer proteins directed to the specific target sites.

[0571] Additional binding domains can be fused to the Cas9 protein to increase specificity. The target sites of these constructs would map to the identified gRNA specified site, but would require additional binding motifs, such as for a zinc finger domain. In the case of Mega-TAL, a meganuclease can be fused to a TALE DNA-binding domain. The meganuclease domain can increase specificity and provide the cleavage. Similarly, inactivated or dead Cas9 (dCas9) can be fused to a cleavage domain and require the sgRNA/Cas9 target site and adjacent binding site for the fused DNA-binding domain. This likely would require some protein engineering of the dCas9, in addition to the catalytic inactivation, to decrease binding without the additional binding site.

### Zinc Finger Nucleases

[0572] Zinc finger nucleases (ZFNs) are modular proteins having an engineered zinc finger DNA binding domain linked to the catalytic domain of the type II endonuclease FokI. Because FokI functions only as a dimer, a pair of ZFNs must be engineered to bind to cognate target “half-site” sequences on opposite DNA strands and with precise spacing between them to enable the catalytically active FokI dimer to form. Upon dimerization of the FokI domain, which itself has no sequence specificity per se, a DNA double-strand break is generated between the ZFN half-sites as the initiating step in genome editing.

[0573] The DNA binding domain of each ZFN typically has 3-6 zinc fingers of the abundant Cys2-His2 architecture, with each finger primarily recognizing a triplet of nucleotides on one strand of the target DNA sequence, although cross-strand interaction with a fourth nucleotide also can be important. Alteration of the amino acids of a finger in positions that make key contacts with the DNA alters the sequence specificity of a given finger. Thus, a four-finger zinc finger protein will selectively recognize a 12 bp target sequence, where the target sequence is a composite of the triplet preferences contributed by each finger, although triplet preference can be influenced to varying degrees by neighboring fingers. An important aspect of ZFNs is that they can be readily re-targeted to almost any genomic address simply by modifying individual fingers, although considerable expertise is required to do this well. In most applications of ZFNs, proteins of 4-6 fingers are used, recognizing 12-18 bp respectively. Hence, a pair of ZFNs will typically recognize a combined target sequence of 24-36 bp, not including the typical 5-7 bp spacer between half-sites. The binding sites can be separated further with larger spacers, including 15-17 bp. A target sequence of this length is likely to be unique in the human genome, assuming repetitive sequences or gene homologs are excluded during the design process. Nevertheless, the ZFN protein-DNA interactions are not absolute in their specificity so off-target binding and cleavage events do occur, either as a heterodimer between the two ZFNs, or as a homodimer of one or the other of the ZFNs. The latter possibility has been effectively eliminated by engineering the dimerization interface of the FokI domain to create “plus” and “minus” variants, also known as obligate heterodimer variants, which can only dimerize with each other, and not with themselves. Forcing the obligate heterodimer prevents formation of the homodimer. This has greatly enhanced specificity of ZFNs, as well as any other nuclease that adopts these FokI variants.

[0574] A variety of ZFN-based systems have been described in the art, modifications thereof are regularly reported, and numerous references describe rules and parameters that are used to guide the design of ZFNs; see, e.g., Segal et al., Proc Natl Acad Sci USA 96(6):2758-63 (1999); Dreier B et al., J Mol Biol. 303(4):489-502 (2000); Liu Q et al., J Biol Chem. 277(6):3850-6 (2002); Dreier et al., J Biol Chem 280(42):35588-97 (2005); and Dreier et al., J Biol Chem. 276(31):29466-78 (2001).

### Transcription Activator-Like Effector Nucleases (TALENs)

[0575] TALENs represent another format of modular nucleases whereby, as with ZFNs, an engineered DNA binding domain is linked to the FokI nuclease domain, and a pair of TALENs operate in tandem to achieve targeted DNA cleavage. The major difference from ZFNs is the nature of the DNA binding domain and the associated target DNA sequence recognition properties. The TALEN DNA binding domain derives from TALE proteins, which were originally described in the plant bacterial pathogen Xanthomonas sp. TALEs have tandem arrays of 33-35 amino acid repeats, with each repeat recognizing a single base pair in the target DNA sequence that is typically up to 20 bp in length, giving a total target sequence length of up to 40 bp. Nucleotide specificity of each repeat is determined by the repeat variable diresidue (RVD), which includes just two amino acids at positions 12 and 13. The bases guanine, adenine, cytosine and thymine are predominantly recognized by the four RVDs: Asn-Asn, Asn-Ile, His-Asp and Asn-Gly, respectively. This constitutes a much simpler recognition code than for zinc fingers, and thus represents an advantage over the latter for nuclease design. Nevertheless, as with ZFNs, the protein-DNA interactions of TALENs are not absolute in their specificity, and TALENs have also benefitted from the use of obligate heterodimer variants of the FokI domain to reduce off-target activity.

[0576] Additional variants of the FokI domain have been created that are deactivated in their catalytic function. If one half of either a TALEN or a ZFN pair contains an inactive FokI domain, then only single-strand DNA cleavage (nicking) will occur at the target site, rather than a DSB. The outcome is comparable to the use of CRISPR/Cas9/Cpf1 “nickase” mutants in which one of the Cas9 cleavage domains has been deactivated. DNA nicks can be used to drive genome editing by HDR, but at lower efficiency than with a DSB. The main benefit is that off-target nicks are quickly and accurately repaired, unlike the DSB, which is prone to NHEJ-mediated mis-repair.

[0577] A variety of TALEN-based systems have been described in the art, and modifications thereof are regularly reported; see, e.g., Boch, Science 326(5959): 1509-12 (2009); Mak et al., Science 335(6069):716-9 (2012); and Moscou et al., Science 326(5959): 1501 (2009). The use of TALENs based on the “Golden Gate” platform, or cloning scheme, has been described by multiple groups; see, e.g., Cermak et al., Nucleic Acids Res. 39(12):e82 (2011); Li et al., Nucleic Acids Res. 39(14):6315-25(2011); Weber et al., PLoS One. 6(2):e16765 (2011); Wang et al., J Genet Genomics 41(6):339-47. Epub 2014 May 17 (2014); and Cermak T et al., Methods Mol Biol. 1239:133-59 (2015).

### Homing Endonucleases

[0578] Homing endonucleases (HEs) are sequence-specific endonucleases that have long recognition sequences (14-44 base pairs) and cleave DNA with high specificity—often at sites unique in the genome. There are at least six known families of HEs as classified by their structure, including LAGLIDADG (SEQ ID NO: 20,209). GIY-YIG, His-Cis box, H-N-H, PD-(D/E)xK, and Vsr-like that are derived from a broad range of hosts, including eukarya, protists, bacteria, archaea, cyanobacteria and phage. As with ZFNs and TALENs, HEs can be used to create a DSB at a target locus as the initial step in genome editing. In addition, some natural and engineered HEs cut only a single strand of DNA, thereby functioning as site-specific nickases. The large target sequence of HEs and the specificity that they offer have made them attractive candidates to create site-specific DSBs.

[0579] A variety of HE-based systems have been described in the art, and modifications thereof are regularly reported; see, e.g., the reviews by Steentoft et al., Glycobiology 24(8):663-80 (2014); Belfort and Bonocora, Methods Mol Biol. 1123:1-26 (2014); Hafez and Hausner. Genome 55(8):553-69 (2012); and references cited therein.

### MegaTAL/Tev-mTALEN/MegaTev

[0580] As further examples of hybrid nucleases, the MegaTAL platform and Tev-mTALEN platform use a fusion of TALE DNA binding domains and catalytically active HEs, taking advantage of both the tunable DNA binding and specificity of the TALE, as well as the cleavage sequence specificity of the HE; see, e.g., Boissel et al., NAR 42: 2591-2601 (2014); Kleinstiver et al., G3 4:1155-65 (2014); and Boissel and Scharenberg, Methods Mol. Biol. 1239: 171-96 (2015).

[0581] In a further variation, the MegaTev architecture is the fusion of a meganuclease (Mega) with the nuclease domain derived from the GIY-YIG homing endonuclease I-TevI (Tev). The two active sites are positioned ˜30 bp apart on a DNA substrate and generate two DSBs with non-compatible cohesive ends; see, e.g., Wolfs et al., NAR 42, 8816-29 (2014). It is anticipated that other combinations of existing nuclease-based approaches will evolve and be useful in achieving the targeted genome modifications described herein.

dCas9-FokI or dCpf1-Fok1 and Other Nucleases

[0582] Combining the structural and functional properties of the nuclease platforms described above offers a further approach to genome editing that can potentially overcome some of the inherent deficiencies. As an example, the CRISPR genome editing system typically uses a single Cas9 endonuclease to create a DSB. The specificity of targeting is driven by a 20 or 24 nucleotide sequence in the guide RNA that undergoes Watson-Crick base-pairing with the target DNA (plus an additional 2 bases in the adjacent NAG or NGG PAM sequence in the case of Cas9 from S. pyogenes). Such a sequence is long enough to be unique in the human genome, however, the specificity of the RNA/DNA interaction is not absolute, with significant promiscuity sometimes tolerated, particularly in the 5′ half of the target sequence, effectively reducing the number of bases that drive specificity. One solution to this has been to completely deactivate the Cas9 or Cpf1 catalytic function—retaining only the RNA-guided DNA binding function—and instead fusing a FokI domain to the deactivated Cas9; see, e.g., Tsai et al., Nature Biotech 32: 569-76 (2014); and Guilinger et al., Nature Biotech. 32: 577-82 (2014). Because FokI must dimerize to become catalytically active, two guide RNAs are required to tether two FokI fusions in close proximity to form the dimer and cleave DNA. This essentially doubles the number of bases in the combined target sites, thereby increasing the stringency of targeting by CRISPR-based systems.

[0583] As further example, fusion of the TALE DNA binding domain to a catalytically active HE, such as I-TevI, takes advantage of both the tunable DNA binding and specificity of the TALE, as well as the cleavage sequence specificity of I-TevI, with the expectation that off-target cleavage can be further reduced.

### VII. Kits

[0584] The present disclosure provides kits for carrying out the methods described herein. A kit can include one or more of a genome-targeting nucleic acid, a polynucleotide encoding a genome-targeting nucleic acid, a site-directed polypeptide, a polynucleotide encoding a site-directed polypeptide, and/or any nucleic acid or proteinaceous molecule necessary to carry out the aspects of the methods described herein, or any combination thereof.

[0585] In some embodiments, a kit can include: (1) a vector having a nucleotide sequence encoding a genome-targeting nucleic acid, (2) the site-directed polypeptide or a vector having a nucleotide sequence encoding the site-directed polypeptide, and (3) a reagent for reconstitution and/or dilution of the vector(s) and or polypeptide.

[0586] In some embodiments, a kit can have: (1) a vector having (i) a nucleotide sequence encoding a genome-targeting nucleic acid, and (ii) a nucleotide sequence encoding the site-directed polypeptide; and (2) a reagent for reconstitution and/or dilution of the vector.

[0587] In some embodiments, a kit can contain composition that includes one or more gRNA that can be used for genome-edition, in particular, insertion of a WAS gene or derivative thereof into a genome of a cell. The gRNA for the kit can be target a genomic site at, within, or near the endogenous WAS gene. Alternatively, the gRNA for the kit can target a safe harbor locus or a safe harbor site. Therefore, in some embodiments, the gRNA can have a spacer sequence complementary to (i) a genomic sequence at, within, or near Wiskott-Aldrich syndrome (WAS) gene or (ii) a genomic sequence at, within, or near a safe harbor locus or a safe harbor site. In some embodiments, the safe harbor locus is selected from the group consisting of albumin gene, an AAVS 1 gene, an HRPT gene, a CCR5 gene, a globin gene, TTR gene, TF gene, F9 gene, Alb gene, Gys2 gene and PCSK9 gene. In some embodiments, the safe harbor site is selected from the group consisting of the following regions: AAVS1 19q13.4-qter. HRPT 1q31.2, CCR5 3p21.31, Globin 1p15.4, TTR 18q12.1, TF 3q22.1, F9 Xq27.1, Alb 4q13.3, Gys2 12p12.1, and PCSK9 1p32.3.

[0588] In some embodiments, a gRNA for a kit is a sequence selected from those listed in Table 4 and variants thereof having at least 85% homology to any of those listed in Table 4.

[0589] In some embodiments, a gRNA for a kit has a spacer sequence that is complementary to a target site in the genome. In some embodiments, the spacer sequence is 15 bases to 20 bases in length. In some embodiments, a complementarity between the spacer sequence to the genomic sequence is at least 80%, at least 85%, at least 90%, at least 95%, at least 96%, at least 97%, at least 98%, at least 99% or at least 100%.

[0590] In some embodiments, the kit can have a deoxyribonucleic acid (DNA) endonuclease or an oligonucleotide encoding said DNA endonuclease and/or a donor template having a nucleic acid sequence of a WAS gene or functional derivative thereof.

[0591] In some embodiments, the DNA endonuclease for the kit is an enzyme selected from the group consisting of any of those in Table 1, Table 2, and variants having at least 70% homology to any of those listed in Table 1 or Table 2. In some embodiments, the DNA endonuclease is Cas 9. In some embodiments, the oligonucleotide encoding the DNA endonuclease is codon optimized. In some embodiments, the oligonucleotide encoding the DNA endonuclease is a deoxyribonucleic acid (DNA) sequence. In some embodiments, the oligonucleotide encoding the DNA endonuclease is a ribonucleic acid (RNA) sequence. In some embodiments where RNA is used as an oligonucleotide encoding the DNA endonuclease, the RNA is linked to the gRNA via a covalent bond.

[0592] In some embodiments, one or more of any oligonucleotides or nucleic acid sequences for the kit can be encoded in an Adeno Associated Virus (AAV) vector. Therefore, in some embodiments, a gRNA can be encoded in an AAV vector. In some embodiments, a nucleic acid encoding a DNA endonuclease can be encoded in an AAV vector. In some embodiments, a donor template can be encoded in an AAV vector. In some embodiments, two or more oligonucleotides or nucleic acid sequences can be encoded in a single AAV vector. Thus, in some embodiments, a gRNA sequence and a DNA endonuclease-encoding nucleic acid can be encoded in a single AAV vector.

[0593] In some embodiments, a kit can have a liposome or a lipid nanoparticle. Therefore, in some embodiments, any compounds (e.g, a DNA endonuclease or a nucleic acid encoding thereof, gRNA and donor template) of the kit can be formulated in a liposome or lipid nanoparticle. In some embodiments, one or more such compounds are associated with a liposome or lipid nanoparticle via a covalent bond or non-covalent bond. In some embodiments, any of the compounds can be separately or together contained in a liposome or lipid nanoparticle. Therefore, in some embodiments, each of a DNA endonuclease or a nucleic acid encoding thereof, gRNA and donor template is separately formulated in a liposome or lipid nanoparticle. In some embodiments, a DNA endonuclease is formulated in a liposome or lipid nanoparticle with gRNA. In some embodiments, a DNA endonuclease or a nucleic acid encoding thereof, gRNA and donor template are formulated in a liposome or lipid nanoparticle together.

[0594] In any of the above kits, the kit can have a single-molecule guide genome-targeting nucleic acid. In any of the above kits, the kit can have a double-molecule genome-targeting nucleic acid. In any of the above kits, the kit can have two or more double-molecule guides or single-molecule guides. The kits can have a vector that encodes the nucleic acid targeting nucleic acid.

[0595] In any of the above kits, the kit can further have a polynucleotide to be inserted to effect the desired genetic modification.

[0596] In embodiments, each of three components, i.e, a DNA endonuclease or an oligonucleotide encoding the DNA endonuclease, one or more gRNA and a donor template having a nucleic acid of a WAS gene or functional derivative thereof can be in separate kits. Alternatively, there are at least two kits and a first kit has a DNA endonuclease or an oligonucleotide encoding the DNA endonuclease and one or more gRNAs and a second kit has the donor template. In some embodiments, all three components are contained in one kit.

[0597] Components of a kit can be in separate containers, or combined in a single container.

[0598] Any kit described above can further have one or more additional reagents, where such additional reagents are selected from a buffer, a buffer for introducing a polypeptide or polynucleotide into a cell, a wash buffer, a control reagent, a control vector, a control RNA polynucleotide, a reagent for in vitro production of the polypeptide from DNA, adaptors for sequencing and the like. A buffer can be a stabilization buffer, a reconstituting buffer, a diluting buffer, or the like. A kit can also have one or more components that can be used to facilitate or enhance the on-target binding or the cleavage of DNA by the endonuclease, or improve the specificity of targeting.

[0599] In addition to the above-mentioned components, a kit can further have instructions for using the components of the kit to practice the methods. The instructions for practicing the methods can be recorded on a suitable recording medium. For example, the instructions can be printed on a substrate, such as paper or plastic, etc. The instructions can be present in the kits as a package insert, in the labeling of the container of the kit or components thereof (i.e., associated with the packaging or subpackaging), etc. The instructions can be present as an electronic storage data file present on a suitable computer readable storage medium, e.g. CD-ROM, diskette, flash drive, etc. In some instances, the actual instructions are not present in the kit, but means for obtaining the instructions from a remote source (e.g. via the Internet), can be provided. An example of this case is a kit that has a web address where the instructions can be viewed and/or from which the instructions can be downloaded. As with the instructions, this means for obtaining the instructions can be recorded on a suitable substrate.

### VIII. Definitions

[0600] The term “comprising” or “comprises” is used in reference to compositions, methods, and respective component(s) thereof, that are essential to the invention, yet open to the inclusion of unspecified elements, whether essential or not.

[0601] The term “consisting essentially of” refers to those elements required for a given aspect. The term permits the presence of additional elements that do not materially affect the basic and novel or functional characteristic(s) of that aspect of the invention.

[0602] The term “consisting of” refers to compositions, methods, and respective components thereof as described herein, which are exclusive of any element not recited in that description of the aspect.

[0603] The singular forms “a,” “an,” and “the” include plural references, unless the context clearly dictates otherwise.

[0604] Certain numerical values presented herein are preceded by the term “about.” The term “about” means numerical values within ±10% of the recited numerical value.

[0605] When a range of numerical values is presented herein, it is contemplated that each intervening value between the lower and upper limit of the range, the values that are the upper and lower limits of the range, and all stated values with the range are encompassed within the disclosure. All the possible sub-ranges within the lower and upper limits of the range are also contemplated by the disclosure.

[0606] The terms “polypeptide”, “peptide”, and “protein” are used interchangeably herein to designate a linear series of amino acid residues connected one to the other by peptide bonds, which series may include proteins, polypeptides, oligopeptides, peptides, and fragments thereof. The protein may be made up of naturally occurring amino acids and/or synthetic (e.g., modified or non-naturally occurring) amino acids. Thus “amino acid”, or “peptide residue”, as used herein means both naturally occurring and synthetic amino acids. The terms “polypeptide”, “peptide”, and “protein” includes fusion proteins, including, but not limited to, fusion proteins with a heterologous amino acid sequence, fusions with heterologous and homologous leader sequences, with or without N-terminal methionine residues; immunologically tagged proteins; fusion proteins with detectable fusion partners, e.g., fusion proteins including as a fusion partner a fluorescent protein, β-galactosidase, luciferase, and the like. Furthermore, it should be noted that a dash at the beginning or end of an amino acid sequence indicates either a peptide bond to a further sequence of one or more amino acid residues or a covalent bond to a carboxyl or hydroxyl end group. However, the absence of a dash should not be taken to mean that such peptide bond or covalent bond to a carboxyl or hydroxyl end group is not present, as it is conventional in representation of amino acid sequences to omit such.

[0607] The term “nucleic acid” is used herein in reference to either DNA or RNA, or molecules which contain deoxy- and/or ribonucleotides. Nucleic acids may be naturally occurring or synthetically made, and as such, include analogs of naturally occurring polynucleotides in which one or more nucleotides are modified over naturally occurring nucleotides.

[0608] The terms “derivative” and “variant” refer without limitation to any compound such as nucleic acid or protein that has a structure or sequence derived from the compounds disclosed herein and whose structure or sequence is sufficiently similar to those disclosed herein such that it has the same or similar activities and utilities or, based upon such similarity, would be expected by one skilled in the art to exhibit the same or similar activities and utilities as the referenced compounds, thereby also interchangeably referred to “functionally equivalent” or as “functional equivalents”. Modifications to obtain “derivatives” or “variants” may include, for example, addition, deletion and/or substitution of one or more of the nucleic acids or amino acid residues.

[0609] The functional equivalent or fragment of the functional equivalent, in the context of a protein, may have one or more conservative amino acid substitutions. The term “conservative amino acid substitution” refers to substitution of an amino acid for another amino acid that has similar properties as the original amino acid. The groups of conservative amino acids are as follows:

| Group | Name of the amino acids |
|---|---|
| Aliphatic | Gly, Ala, Val, Leu, Ile |
| Hydroxyl or Sulfhydryl/ | Ser, Cys, Thr, Met |
| Selenium-containing | |
| Cyclic | Pro |
| Aromatic | Phe, Tyr, Trp |
| Basic | His, Lys, Arg |
| Acidic and their Amide | Asp, Glu, Asn, Gln |

[0610] Conservative substitutions may be introduced in any position of a preferred predetermined peptide or fragment thereof. It may however also be desirable to introduce non-conservative substitutions, particularly, but not limited to, a non-conservative substitution in any one or more positions. A non-conservative substitution leading to the formation of a functionally equivalent fragment of the peptide would for example differ substantially in polarity, in electric charge, and/or in steric bulk while maintaining the functionality of the derivative or variant fragment.

[0611] “Percentage of sequence identity” is determined by comparing two optimally aligned sequences over a comparison window, wherein the portion of the polynucleotide or polypeptide sequence in the comparison window may have additions or deletions (i.e., gaps) as compared to the reference sequence (which does not have additions or deletions) for optimal alignment of the two sequences. In some cases the percentage can be calculated by determining the number of positions at which the identical nucleic acid base or amino acid residue occurs in both sequences to yield the number of matched positions, dividing the number of matched positions by the total number of positions in the window of comparison and multiplying the result by 100 to yield the percentage of sequence identity.

[0612] The terms “identical” or percent “identity” in the context of two or more nucleic acid or polypeptide sequences, refer to two or more sequences or subsequences that are the same or have a specified percentage of amino acid residues or nucleotides that are the same (e.g., 60%, 65%, 70%, 75%, 80%, 85%, 90%, 95%, 98%, or 99% identity over a specified region, e.g., the entire polypeptide sequences or individual domains of the polypeptides), when compared and aligned for maximum correspondence over a comparison window or designated region as measured using one of the following sequence comparison algorithms or by manual alignment and visual inspection. Such sequences are then said to be “substantially identical.” This definition also refers to the complement of a test sequence.

[0613] The terms “plasmid”. “vector”, “expression cassette” or “expression vector” refer to a nucleic acid molecule that encodes for one or more genes of interest and/or one or more regulatory elements necessary for the expression of the genes of interest.

[0614] The term “isolated” is intended to mean that a compound is separated from all or some of the components that accompany it in nature. “Isolated” also refers to the state of a compound separated from all or some of the components that accompany it during manufacture (e.g., chemical synthesis, recombinant expression, culture medium, and the like). “Isolated,” in the context of isolating a cell, can also mean that one or more cells are separated from a group of cells or from a tissue, organ or subject such as an animal or human.

[0615] The term “purified” is intended to mean that a compound of interest is isolated and further enriched.

[0616] The term “recombinant” or “engineered” when used with reference, for example, to a cell, a nucleic acid, a protein, or a vector, indicates that the cell, nucleic acid, protein or vector has been modified by or is the result of laboratory methods. Thus, for example, recombinant or engineered proteins include proteins produced by laboratory methods. Recombinant or engineered proteins can include amino acid residues not found within the native (non-recombinant) form of the protein or can be include amino acid residues that have been modified, e.g., labeled. The term can include any modifications to the peptide, protein, or nucleic acid sequence. Such modifications may include the following: any chemical modifications of the peptide, protein or nucleic acid sequence, including of one or more amino acids, deoxyribonucleotides, or ribonucleotides; addition, deletion, and/or substitution of one or more of amino acids in the peptide or protein; and addition, deletion, and/or substitution of one or more of nucleic acids in the nucleic acid sequence.

[0617] As used herein, “codon” refers to a sequence of three nucleotides that together form a unit of genetic code in a DNA or RNA molecule. As used herein the term “codon degeneracy” refers to the nature in the genetic code permitting variation of the nucleotide sequence without affecting the amino acid sequence of an encoded polypeptide.

[0618] The term “codon-optimized” or “codon optimization” refers to genes or coding regions of nucleic acid molecules for transformation of various hosts, refers to the alteration of codons in the gene or coding regions of the nucleic acid molecules to reflect the typical codon usage of the host organism without altering the polypeptide encoded by the DNA. Such optimization includes replacing at least one, or more than one, or a significant number, of codons with one or more codons that are more frequently used in the genes of that organism. Given the large number of gene sequences available for a wide variety of animal, plant and microbial species, it is possible to calculate the relative frequencies of codon usage. Codon usage tables are readily available, for example, at the “Codon Usage Database” available at www.kazusa.or.jp/codon/(visited Mar. 20, 2008). By utilizing the knowledge on codon usage or codon preference in each organism, one of ordinary skill in the art can apply the frequencies to any given polypeptide sequence, and produce a nucleic acid fragment of a codon-optimized coding region which encodes the polypeptide, but which uses codons optimal for a given species. Codon-optimized coding regions can be designed by various methods known to those skilled in the art.

[0619] As used herein, “transgene,” “exogenous gene” or “exogenous sequence”, in the context of nucleic acid, refers to a nucleic acid sequence or gene that was not present in the genome of a cell but artificially introduced into the genome, e.g. via genome-edition.

[0620] As used herein. “endogenous gene” or “endogenous sequence”, in the context of nucleic acid, refers to a nucleic acid sequence or gene that is naturally present in the genome of a cell, without being introduced via any artificial means.

[0621] The term “concentration” used in the context of a molecule such as peptide fragment refers to an amount of molecule, e.g., the number of moles of the molecule, present in a given volume of solution.

[0622] The details of one or more embodiments of the disclosure are set forth in the accompanying description below. Although any materials and methods similar or equivalent to those described herein can be used in the practice or testing of the present disclosure, the preferred materials and methods are now described. Other features, objects and advantages of the disclosure will be apparent from the description. In the description, the singular forms also include the plural unless the context clearly dictates otherwise. Unless defined otherwise, all technical and scientific terms used herein have the same meaning as commonly understood by one of ordinary skill in the art to which this disclosure belongs. In the case of conflict, the present description will control.

[0623] The present disclosure is further illustrated by the following non-limiting examples.

### IX. Examples

[0624] The disclosure will be more fully understood by reference to the following examples, which provide illustrative non-limiting aspects of the disclosure.

[0625] The examples describe the use of the CRISPR system as an illustrative genome editing technique to create defined therapeutic genomic deletions, insertions, or replacements, termed “genomic modifications” herein, in the WAS gene that lead to permanent correction of mutations in the genomic locus, or expression at a heterologous locus, that restore WAS protein activity. Introduction of the defined therapeutic modifications represents a novel therapeutic strategy for the potential amelioration of Wiskott-Aldrich Syndrome (WAS), as described and illustrated herein.

### Example 1—CRISPR/SnCas9 Target Sites

[0626] Regions of the WAS gene were scanned for target sites. Each area was scanned for a protospacer adjacent motif (PAM) having the sequence NRG. gRNA 20 bp spacer sequences corresponding to the PAM were then identified. Such gRNA is between 15 and 200 nucleotides in length

[0627] Regions of the AAVS1 gene which is one of safe harbor genes are scanned for target sites. Each area was scanned for a protospacer adjacent motif (PAM) having the sequence NRG. gRNA 20 bp spacer sequences corresponding to the PAM were then identified. Such gRNA is between 15 and 200 nucleotides in length

### Example 2—CRISPR/SaCas9 Target Sites

[0628] Regions of the WAS gene and the AAVS1 gene were scanned for target sites as described in Example 1. Each area was scanned for a protospacer adjacent motif (PAM) having the sequence NNGRRT. gRNA 24 bp spacer sequences corresponding to the PAM are then identified. Such gRNA is be between 15 and 200 nucleotides in length

### Example 3—CRISPR/StCas9 Target Sites

[0629] Regions of the WAS gene and the AAVS1 gene were scanned for target sites as described in Example 1. Each area was scanned for a protospacer adjacent motif (PAM) having the sequence NNAGAAW. gRNA 24 bp spacer sequences corresponding to the PAM are then identified. Such gRNA is between 15 and 200 nucleotides in length

### Example 4—CRISPR/TdCas9 Target Sites

[0630] Regions of the WAS gene and the AAVS1 gene were scanned for target sites as described in Example 1. Each area was scanned for a protospacer adjacent motif (PAM) having the sequence NAAAAC. gRNA 24 bp spacer sequences corresponding to the PAM are then identified. Such gRNA is between 15 and 200 nucleotides in length

### Example 5—CRISPR/NmCas9 Target Sites

[0631] Regions of the WAS gene and the AAVS1 gene were scanned for target sites as described in Example 1. Each area was scanned for a protospacer adjacent motif (PAM) having the sequence NNNNGATT. gRNA 24 bp spacer sequences corresponding to the PAM are then identified. Such gRNA is between 15 and 200 nucleotides in length

### Example 6—CRISPR/Cpf1 Target Sites

[0632] Regions of the WAS gene and the AAVS1 gene were scanned for target sites as described in Example 1. Each area was scanned for a protospacer adjacent motif (PAM) having the sequence was TTN or YTN. gRNA 24 bp spacer sequences corresponding to the PAM are then identified. Such gRNA is between 15 and 200 nucleotides in length

### Example 7—Bioinformatics Analysis of the Guide Strands

[0633] Candidate guides are then screened and selected in a single process or multi-step process that involves both theoretical binding and experimentally assessed activity. By way of illustration, candidate guides having sequences that match a particular on-target site, such as a site at, within, or near the WAS gene or a safe harbor site, with adjacent PAM are assessed for their potential to cleave at off-target sites having similar sequences, using one or more of a variety of bioinformatics tools available for assessing off-target binding in order to assess the likelihood of effects at chromosomal positions other than those intended.

[0634] Candidates predicted to have relatively lower potential for off-target activity are assessed experimentally to measure their on-target activity, and then off-target activities at various sites. Preferred guides have sufficiently high on-target activity to achieve desired levels of gene editing at the selected locus, and relatively lower off-target activity to reduce the likelihood of alterations at other chromosomal loci. The ratio of on-target to off-target activity is referred to as the “specificity” of a guide.

[0635] For initial screening of predicted off-target activities, there are a number of bioinformatics tools known and publicly available that can be used to predict the most likely off-target sites; and since binding to target sites in the CRISPR/Cas9/Cpf1 nuclease system is driven by Watson-Crick base pairing between complementary sequences, the degree of dissimilarity (and therefore reduced potential for off-target binding) is essentially related to primary sequence differences; mismatches and bulges, i.e. bases that are changed to a non-complementary base, and insertions or deletions of bases in the potential off-target site relative to the target site. An exemplary bioinformatics tool called COSMID (CRISPR Off-target Sites with Mismatches. Insertions and Deletions) (available on the web at crispr.bme.gatech.edu) compiles such similarities. Other bioinformatics tools include, but are not limited to, GUIDO, autoCOSMID, and CCtop.

[0636] Bioinformatics are used to minimize off-target cleavage in order to reduce the detrimental effects of mutations and chromosomal rearrangements. Studies on CRISPR/Cas9 systems suggested the possibility of high off-target activity due to nonspecific hybridization of the guide strand to DNA sequences with base pair mismatches and/or bulges, particularly at positions distal from the PAM region. Therefore, it is important to have a bioinformatics tool that can identify potential off-target sites that have insertions and/or deletions between the RNA guide strand and genomic sequences, in addition to base-pair mismatches. The bioinformatics-based tool, COSMID (CRISPR Off-target Sites with Mismatches, Insertions and Deletions) was therefore used to search genomes for potential CRISPR off-target sites (available on the web at crispr.bme.gatech.edu). COSMID output ranked lists of the potential off-target sites based on the number and location of mismatches, allowing more informed choice of target sites, and avoiding the use of sites with more likely off-target cleavage.

[0637] Additional bioinformatics pipelines are employed that weigh the estimated on- and/or off-target activity of gRNA targeting sites in a region. Other features that are used to predict activity include information about the cell type in question, DNA accessibility, chromatin state, transcription factor binding sites, transcription factor binding data, and other CHIP-seq data. Additional factors are weighed that predict editing efficiency, such as relative positions and directions of pairs of gRNAs, local sequence features and micro-homologies.

### Example 8—Testing of Preferred Guides in Cells for On-Target Activity

[0638] The gRNAs predicted to have the lowest off-target activity were tested for on-target activity in a model cell line of stable HEK293T cells that expresses S. pyogenes Cas9, and evaluated for InDel frequency using TIDE or next generation sequencing. TIDE is a web tool to rapidly assess genome editing by CRISPR-Cas9 of a target locus determined by a guide RNA (gRNA or sgRNA). Based on quantitative sequence trace data from two standard capillary sequencing reactions, the TIDE software quantifies the editing efficacy and identifies the predominant types of insertions and deletions (InDels) in the DNA of a targeted cell pool. See Brinkman et al., Nucl. Acids Res. (2014) for a detailed explanation and examples. Next-generation sequencing (NGS), also known as high-throughput sequencing, is the catch-all term used to describe a number of different modern sequencing technologies including: Illumina (Solexa) sequencing, Roche 454 sequencing, Ion torrent: Proton/PGM sequencing, and SOLiD sequencing. These recent technologies allow one to sequence DNA and RNA much more quickly and cheaply than the previously used Sanger sequencing, and as such have revolutionized the study of genomics and molecular biology.

[0639] Transfection of tissue culture cells is used for screening of different constructs and a robust means of testing activity and specificity. Tissue culture cell lines, such as HEK293T, are easily transfected and result in high activity. These or other cell lines are evaluated to determine the cell lines that match with HEK293T and provide the best surrogate. These cells are then be used for many early stage tests. In one test, individual gRNAs for S. pyogenes Cas9 are transfected into the cells via lipofection. Several days later, the genomic DNA is harvested and the target site amplified by PCR The cutting activity is measured by the rate of insertions, deletions and mutations introduced by NHEJ repair of the free DNA ends. Although this method cannot differentiate correctly repaired sequences from uncleaved DNA, the level of cutting is gauged by the amount of mis-repair. Off-target activity is observed by amplifying identified putative off-target sites and using similar methods to detect cleavage. In another test, translocation is assayed using primers flanking cut sites, to determine if specific cutting and translocations happen. Un-guided assays is also preformed to conduct complementary testing of off-target cleavage including guide-seq. The gRNA or pairs of gRNA with significant activity is followed up in cultured cells to measure correction of the WAS gene mutation. Off-target events is followed again. A variety of cells is transfected and the level of gene correction and possible off-target events are measured. With this series of test, optimization of nuclease and donor design and delivery are achieved.

### Example 9—Testing of Preferred Guides in Cells for Off-Target Activity

[0640] The gRNAs having the best on-target activity from the TIDE and next generation sequencing studies in the above example were tested for off-target activity using whole genome sequencing.

[0641] Table 4 shows spacer sequences of gRNAs that were selected for further testing. Each of the gRNA sequences was introduced with DNA endonuclease into a cell, cutting at the target site upstream of the endogenous WAS gene and their cutting efficiency at the intended target site was measured.

### Example 10—Testing Different Approaches for HDR Gene Editing

[0642] After testing the gRNAs for both on-target activity and off-target activity, mutation correction and knock-in strategies are tested for HDR gene editing.

[0643] For the mutation correction approach, donor DNA template is provided as a short single-stranded oligonucleotide, a short double-stranded oligonucleotide (PAM sequence intact/PAM sequence mutated), a long single-stranded DNA molecule (PAM sequence intact/PAM sequence mutated) or a long double-stranded DNA molecule (PAM sequence intact/PAM sequence mutated). In addition, the donor DNA template is delivered by AAV.

[0644] For the cDNA knock-in approach, a single-stranded or double-stranded DNA having homologous arms to the WAS gene chromosomal region includes more than 40 nt of the first exon (the first coding exon) of the WAS gene, the complete CDS of the WAS gene and 3′ UTR of the WAS gene, and at least 40 nt of the following intron. The single-stranded or double-stranded DNA having homologous arms to the WAS gene chromosomal region includes more than 80 nt of the first exon of the WAS gene, the complete CDS of the WAS gene and 3′ UTR of the WAS gene, and at least 80 nt of the following intron. The single-stranded or double-stranded DNA having homologous arms to the WAS gene chromosomal region include more than 100 nt of the first exon of the WAS gene, the complete CDS of the WAS gene and 3′ UTR of the WAS gene, and at least 100 nt of the following intron. The single-stranded or double-stranded DNA having homologous arms to the WAS gene chromosomal region includes more than 150 nt of the first exon of the WAS gene, the complete CDS of the WAS gene and 3′ UTR of the WAS gene, and at least 150 nt of the following intron. The single-stranded or double-stranded DNA having homologous arms to the WAS gene chromosomal region includes more than 300 nt of the first exon of the WAS gene, the complete CDS of the WAS gene and 3′ UTR of the WAS gene, and at least 300 nt of the following intron. The single-stranded or double-stranded DNA having homologous arms to the WAS gene chromosomal region includes more than 400 nt of the first exon of the WAS gene, the complete CDS of the WAS gene and 3′ UTR of the WAS gene, and at least 400 nt of the following intron.

[0645] The constructs illustrated in FIGS. 3 and 4 show exemplary AAV vectors that were used to insert a WAS gene or functional derivative thereof into a genome. The construct of FIG. 3 was used for the insertion at, within, or near the WAS gene locus. The construct of FIG. 4 was used for the insertion in a safe harbor locus or site, e.g, at, within, or near the AAVS1 gene locus. The vectors also contained a reporter gene mCherry for in vitro analysis of integration, besides a sequence encoding the WAS gene. The reporter gene is optional for therapeutic purposes.

[0646] Alternatively, the DNA template is delivered by a recombinant AAV particle such as those taught herein.

[0647] A knock-in of WAS gene cDNA is performed into any selected chromosomal location or in one of the “safe-harbor” locus, i.e., albumin gene, an AAVS1 gene, an HRPT gene, a CCR5 gene, a globin gene. TTR gene, TF gene. F9 gene, Alb gene. Gys2 gene and PCSK9 gene. Assessment of efficiency of HDR mediated knock-in of cDNA into the first exon utilizes cDNA knock-in into “safe harbor” sites such as: single-stranded or double-stranded DNA having homologous arms to one of the following regions, for example: AAVS1 19q13.4-qter. HRPT 1q31.2, CCR5 3p21.31, Globin 11p15.4. TTR 18q12.1, TF 3q22.1, F9 Xq27.1. Alb 4q13.3, Gys2 12p12.1, PCSK9 1p32.3; 5′UTR correspondent to WAS gene or alternative 5′ UTR, complete CDS of WAS gene and 3′ UTR of WAS gene or modified 3′ UTR and at least 80 nt of the first intron, alternatively same DNA template sequence will be delivered by AAV.

### Example 11—Re-Assessment of Lead CRISPR-Cas9/DNA Donor Combinations

[0648] After testing the different strategies for HDR gene editing, the lead CRISPR-Cas9/DNA donor combinations were re-assessed in cells for efficiency of deletion, recombination, and off-target specificity. Cas9 mRNA or RNP are formulated into lipid nanoparticles for delivery, sgRNAs are formulated into nanoparticles or delivered as a recombinant AAV particle, and donor DNA are formulated into nanoparticles or delivered as recombinant AAV particle.

### Example 12—In Vivo Testing in Relevant Animal Model

[0649] After the CRISPR-Cas9/DNA donor combinations have been re-assessed, the lead formulations are tested in vivo in a FGR mouse model with the livers repopulated with human hepatocytes (normal or WAS gene-deficient).

### Example 13—In Vivo Testing in Relevant Animal Model

[0650] After the CRISPR-Cas9/DNA donor combinations have been assessed, the expression of WAS or functional derivative thereof is tested in vivo in the WAS knock-out (Was^{-/-}) or WAS-deficient mouse model that is constructed as described in Shimizua. M, et al., “Development of IgA nephropathy-like glomerulonephritis associated with Wiskott-Aldrich syndrome protein deficiency,” 2011, Clin. Immunol., vol. 142, issue 2, pp.: 160-166, which is incorporated herein by reference in entirety.

### Example 14—In Vivo Testing in Relevant Animal Model

[0651] After the CRISPR-Cas9/DNA donor combinations have been assessed, the expression of WAS or functional derivative thereof is tested in vivo in the WAS knock-out (Was^{-/-}) or WAS-deficient mouse model that is constructed as described in Snapper. S, et al., “Wiskott-Aldrich Syndrome Protein-Deficient Mice Reveal a Role for WASP in T but Not B Cell Activation,” 1998, Immunity, vol. 9, issue 1, pp.: 81-91, which is incorporated herein by reference in entirety.

### Example 15-Functional Analysis of WAS Expression

[0652] WAS-deficient T and B cell lines were generated by introducing single base insertions in exon 7 of the WAS gene by introducing CRISPR/Cas9 and site specific gRNA (CCCTGGGGCTGGCGACAGTGG) through nucleofection. WAS-deficient T and B cell clones were expanded and genomic sequencing confirmed interruption of WAS gene. Absence of WAS protein was confirmed using standard protein analysis techniques. Rescue of WAS expression was achieved by insertion of full length WAS cDNA and 500 bp upstream sequence for proximal promoter at endogenous WAS locus or MND with full length WAS cDNA at AAVS1 locus in WAS-deficient cell lines.

[0653] WAS-deficient T and B cell lines were analyzed for ability to migrate toward a chemoattractant, such as SDF1-alpha, through a transwell membrane. WAS-deficient T and B cell lines have impaired migration toward chemo attractants in comparison to WAS-expressing T and B cell lines as determined by quantification of cells that have migrated through the membrane. WAS-deficient T and B cell lines were analysed for ability to proliferate in response to activation by a stimulator, such as phorbol myristate acetate (PMA) or lipopolysaccharide (LPS). Briefly, cells were labeled with a fluorophore, such as carboxyfluorescein succinimidyl ester to allow tracking of number of cell divisions based on fluorescent intensity of labeled cells after 3 or more days in culture. Fluorescent intensity was measured on individual cells flow cytometrically and numbers of cells which had completed 1, 2, 3, 4, 5 or more cell divisions were quantified. WAS-deficient T and B cell lines had impaired proliferation in response to stimulation in comparison to WAS-expressing T and B cell lines.

### Example 16—Screening of gRNAs

[0654] To identify a large spectrum of pairs of gRNAs able to edit the WAS DNA target region, an in vitro transcribed (IVT) gRNA screen was conducted. WAS genomic sequence was analyzed using a gRNA design software as described herein. The resulting list of gRNAs was narrowed to a list of 188 gRNAs (see Table 4). This set of gRNAs was in vitro transcribed, and transfected together with Cas9 protein in a test cell using electroporation (Lonza 4D with 96 well shuttle). Cells were harvested 48 hours post transfection, the genomic DNA was isolated, and cutting efficiency was evaluated using TIDE analysis.

### X. Equivalents and Scope

[0655] Those skilled in the art will recognize, or be able to ascertain using no more than routine experimentation, many equivalents to the specific embodiments in accordance with the disclosure described herein. The scope of the present disclosure is not intended to be limited to the above Description, but rather is as set forth in the appended claims.

[0656] In the claims, articles such as “a,” “an,” and “the” may mean one or more than one unless indicated to the contrary or otherwise evident from the context. Claims or descriptions that include “or” between one or more members of a group are considered satisfied if one, more than one, or all of the group members are present in, employed in, or otherwise relevant to a given product or process unless indicated to the contrary or otherwise evident from the context. The disclosure includes embodiments in which exactly one member of the group is present in, employed in, or otherwise relevant to a given product or process. The disclosure includes embodiments in which more than one, or the entire group members are present in, employed in, or otherwise relevant to a given product or process.

[0657] It is also noted that the term “comprising” is intended to be open and permits but does not require the inclusion of additional elements or steps. When the term “comprising” is used herein, the term “consisting of” is thus also encompassed and disclosed.

[0658] Where ranges are given, endpoints are included. Furthermore, it is to be understood that unless otherwise indicated or otherwise evident from the context and understanding of one of ordinary skill in the art, values that are expressed as ranges can assume any specific value or subrange within the stated ranges in different embodiments of the disclosure, to the tenth of the unit of the lower limit of the range, unless the context clearly dictates otherwise.

[0659] In addition, it is to be understood that any particular embodiment of the present disclosure that falls within the prior art may be explicitly excluded from any one or more of the claims. Since such embodiments are deemed to be known to one of ordinary skill in the art, they may be excluded even if the exclusion is not set forth explicitly herein. Any particular embodiment of the compositions of the disclosure (e.g., any antibiotic, therapeutic or active ingredient; any method of production; any method of use; etc.) can be excluded from any one or more claims, for any reason, whether or not related to the existence of prior art.

[0660] It is to be understood that the words which have been used are words of description rather than limitation, and that changes may be made within the purview of the appended claims without departing from the true scope and spirit of the disclosure in its broader aspects.

[0661] While the present disclosure has been described at some length and with some particularity with respect to the several described embodiments, it is not intended that it should be limited to any such particulars or embodiments or any particular embodiment, but it is to be construed with references to the appended claims so as to provide the broadest possible interpretation of such claims in view of the prior art and, therefore, to effectively encompass the intended scope of the disclosure.

What is claimed is:

1. A method of editing a genome in a cell, the method comprising:
inserting a nucleic acid sequence of a Wiskott-Aldrich syndrome gene (WAS gene) or functional derivative thereof into a genomic sequence of the cell,
wherein said cell has one or more mutation(s) in the genome which results in reduction of the expression of endogenous WAS gene as compared to said expression in a normal cell that does not have such mutation(s).

2. The method of claim 1 further comprising providing the following to the cell:
(a) a deoxyribonucleic acid (DNA) endonuclease or an oligonucleotide encoding said DNA endonuclease; and
(b) a targeting oligonucleotide comprising a first region of at least 15 bases complementary to the genomic sequence; wherein the WAS gene or functional derivative thereof is inserted using a donor template comprising the nucleic acid sequence of the WAS gene or functional derivative thereof.

3. The method of claim 2, wherein said DNA endonuclease is an enzyme selected from the group consisting of any of those in Table 1, Table 2, and variants having at least 70% homology to any of those listed in Table 1 or Table 2.

4. The method of claim 2, wherein said DNA endonuclease is Cas 9.

5. The method of claim 2, wherein the oligonucleotide encoding said DNA endonuclease is codon optimized.

6. The method of claim 2, wherein the oligonucleotide encoding said DNA endonuclease is a deoxyribonucleic acid (DNA) sequence.

7. The method of claim 2, wherein the oligonucleotide encoding said DNA endonuclease is a ribonucleic acid (RNA) sequence.

8. The method of claim 7, wherein the RNA sequence encoding said DNA endonuclease is linked to the targeting oligonucleotide via a covalent bond.

9. The method of claim 2, wherein said targeting oligonucleotide is a guide RNA (gRNA).

10. The method of claim 9, wherein the first region of said gRNA is selected from those listed in Table 4 and variants thereof having at least 85% homology to any of those listed in Table 4.

11. The method of claim 1, wherein said genomic sequence is at, within, or near the WAS gene or WAS gene regulatory elements.

12. The method of claim 11, wherein said genomic sequence is in an intergenic region that is upstream of the promoter of the endogenous WAS gene in the genome.

13. The method of claim 11, wherein said intergenic region is at least 500 bp upstream of the first exon of the endogenous WAS gene in the genome.

14. The method claim 1, wherein said inserting is at, within, or near a safe harbor locus or a safe harbor site.

15. The method of claim 14, wherein said safe-harbor locus is selected from the group consisting of albumin gene, AAVS1 gene, HRPT gene, CCR5 gene, globin gene, TTR gene, TF gene, F9 gene, Alb gene, Gys2 gene and PCSK9 gene.

16. The method of claim 14, wherein said safe harbor site is selected from the group consisting of the following regions: AAVS119q13.4-qter, HRPT 1q31.2, CCR5 3p21.31, Globin 11p15.4, TTR 18q12.1, TF 3q22.1, F9 Xq27.1, Alb 4q113.3, Gys2 12p12.1, and PCSK9 1p32.3.

17. The method of claim 15, wherein said genomic sequence is at, within, or near the AAVS1 gene.

18. The method of claim 17, wherein said genomic sequence is in an intergenic region that is upstream of the promoter of the AAVS11 gene in the genome.

19. The method of claim 17, wherein said intergenic region is at least 2.5 kb upstream of the first exon of the AAVS1 gene in the genome.

20. The method of claim 17, wherein said intergenic region is about 2.5 kb to about 5 kb upstream of the first exon of the AAVS1 gene in the genome.

21. The method of claim 2, wherein one or more of said oligonucleotides are encoded in an Adeno Associated Virus (AAV) vector.

22. The method of claim 2, wherein said DNA endonuclease and/or one or more of said oligonucleotide are formulated in a liposome or lipid nanoparticle.

23. The method of claim 22, wherein said DNA endonuclease is formulated in a liposome or lipid nanoparticle.

24. The method of claim 23, wherein said liposome or lipid nanoparticle further comprises the targeting oligonucleotide.

25. The method of claim 2, wherein said one or more of (a), (b) and (c) are provided to the cell via electroporation.

26. The method of claim 2, wherein said one or more of (a), (b) and (c) are provided to the cell via chemical transfection.

27. The method of claim 2, wherein said DNA endonuclease is precomplexed with the targeting oligonucleotide, forming a Ribonucleoprotein (RNP) complex, prior to the provision to the cell.

28. The method of claim 27, wherein said RNP is provided to the cell via electroporation.

29. The method of claim 1, wherein said one or more mutation(s) are present at, within, or near the endogenous WAS gene in the genome.

30. The method of claim 1, the expression of endogenous WAS gene in said cell is about 10%, about 20%, about 30%, about 40%, about 50%, about 60%, about 70%, about 80%, about 90% or about 100% reduced as compared to the expression of endogenous WAS gene expression in the normal cell.

31. The method of claim 1, wherein the expression of the introduced WAS gene or functional derivative thereof in the cell is at least about 10%, about 20%, about 30%, about 40%, about 50%, about 60%, about 70%, about 80%, about 90%, about 100%, about 200%, about 300%, about 400%, about 500%, about 600%, about 700%, about 800%, about 900%, about 1,000%, about 2,000%6, about 3,000%, about 5,000%, about 10,000% or more as compared to the expression of endogenous WAS gene of the cell.

32. The method of claim 1, wherein the expression of the introduced WAS gene or functional derivative thereof in the cell is at least about 2 folds, about 3 folds, about 4 folds, about 5 folds, about 6 folds, about 7 folds, about 8 folds, about 9 folds, about 10 folds, about 15 folds, about 20 folds, about 30 folds, about 50 folds, about 100 folds or more of the expression of endogenous WAS gene of the cell

33. The method of claim 1, wherein said cell is a stem cell.

34. The method of claim 33, wherein said stem cell is a CD34⁺ hematopoietic stem and progenitor cell (HSPC).

35. A method of treating a subject for a Wiskott-Aldrich syndrome (WAS) gene related condition or disorder comprising:
providing a genetically modified cell to the subject,
wherein a genome of the genetically modified cell is edited such that an exogenous nucleic acid sequence of a WAS gene or functional derivative thereof is inserted in the genome.

36. The method of claim 35, wherein said subject is a patient having or is suspected of having Wiskott-Aldrich syndrome (WAS).

37. The method of claim 35, wherein said subject is diagnosed with a risk of the Wiskott-Aldrich syndrome (WAS) gene related condition or disorder.

38. The method of claim 35, wherein said genetically modified cell is autologous.

39. The method of claim 38, wherein said autologous cell has one or more mutation(s) in the genome which results in reduction of the expression of endogenous WAS gene as compared to the expression of endogenous WAS gene in a normal cell that does not have such mutation(s).

40. The method of claim 39, wherein said one or more mutation(s) are present at, within, or near the endogenous WAS gene in the genome.

41. The method of claim 39, the expression of endogenous WAS gene in the genetically modified cell is about 10%, about 20%, about 30%, about 40%, about 50%, about 60%, about 70%, about 80%, about 90%6 or about 100% reduced as compared to the expression of endogenous WAS gene expression in a normal cell that does not have such mutation(s).

42. The method of claim 39, wherein the expression of the introduced WAS gene or functional derivative thereof in the genetically modified cell is at least about 10%, about 20%, about 30%, about 40%, about 50%, about 60%, about 70%, about 80%, about 90%, about 100%, about 200%, about 300%, about 400%, about 500%, about 600%, about 700%, about 800%, about 900%, about 1,000%, about 2,000%, about 3,000%, about 5,000%, about 10,000% or more as compared to the expression of endogenous WAS gene of the genetically modified cell.

43. The method of claim 39, wherein the expression of the introduced WAS gene or functional derivative thereof in the genetically modified cell is at least about 2 folds, about 3 folds, about 4 folds, about 5 folds, about 6 folds, about 7 folds, about 8 folds, about 9 folds, about 10 folds, about 15 folds, about 20 folds, about 30 folds, about 50 folds, about 100 folds or more of the expression of endogenous WAS gene of the genetically modified cell.

44. The method of claim 35, wherein said cell is a stem cell.

45. The method of claim 44, wherein said stem cell is a CD34⁺ hematopoietic stem and progenitor cell (HSPC).

46. The method of claim 35 further comprising:
obtaining a biological sample from the subject wherein the biological sample comprises a CD34⁺ cell; and
editing the genome of at least one cell by inserting the exogenous nucleic acid sequence of a WAS gene or functional derivative thereof into a genomic sequence of the cell, thereby producing the genetically modified cell.

47. The method of claim 35, wherein the exogenous nucleic acid sequence is inserted at, within, or near the WAS gene or WAS gene regulatory elements.

48. The method of claim 35, wherein said genomic sequence is in an intergenic region that is upstream of the promoter of the endogenous WAS gene in the genome.

49. The method of claim 35, wherein said intergenic region is at least 500 bp upstream of the first exon of the endogenous WAS gene in the genome.

50. The method of claim 35, wherein the exogenous nucleic acid sequence is inserted at, within, or near a safe harbor locus or a safe harbor site.

51. The method of claim 50, wherein said safe-harbor locus is selected from the group consisting of albumin gene, AAVS1 gene, HRPT gene, CCR5 gene, globin gene, TTR gene, TF gene, F9 gene, Alb gene, Gys2 gene and PCSK9 gene.

52. The method of claim 50, wherein said safe harbor site is selected from the group consisting of the following regions: AAVS1 19q113.4-qter, HRPT 1q31.2, CCR5 3p21.31, Globin 11p15.4, TTR 18q12.1, TF 3q22.1, F9 Xq27.1, Alb 4q13.3, Gys2 12p12.1, and PCSK9 1p32.3.

53. The method of claim 51, wherein the exogenous nucleic acid sequence is inserted at, within, or near the AAVS1 gene.

54. The method of claim 53, wherein said genomic sequence is in an intergenic region that is upstream of the promoter of the AAVS1 gene in the genome.

55. The method of claim 53, wherein said intergenic region is at least 2.5 kb upstream of the first exon of the AAVS1 gene in the genome.

56. The method of claim 53, wherein said intergenic region is about 2.5 kb to about 5 kb upstream of the first exon of the AAVS1 gene in the genome.

57. A composition comprising a guide RNA (gRNA) sequence comprising a sequence selected from those listed in Table 4 and/or variants thereof having at least 85% homology to any of those listed in Table 4.

58. The composition of claim 57 further comprising a DNA endonuclease or an oligonucleotide encoding said DNA endonuclease.

59. The composition of claim 58 further comprising a donor template comprising a nucleic acid sequence of a WAS gene or functional derivative thereof.

60. The composition of claim 59, wherein said DNA endonuclease is an enzyme selected from the group consisting of any of those in Table 1, Table 2, and variants having at least 70% homology to any of those listed in Table 1 or Table 2.

60. The composition of claim 59, wherein said DNA endonuclease is Cas 9.

61. The composition of claim 58, wherein the oligonucleotide encoding said DNA endonuclease is codon optimized.

62. The composition of claim 58, wherein the oligonucleotide encoding said DNA endonuclease is a deoxyribonucleic acid (DNA) sequence.

63. The composition of claim 58, wherein the oligonucleotide encoding said DNA endonuclease is a ribonucleic acid (RNA) sequence.

64. The composition of claim 63, wherein the RNA sequence encoding said DNA endonuclease is linked to the gRNA via a covalent bond.

65. The composition of claim 58 further comprising a liposome or lipid nanoparticle.

66. The composition of claim 58, wherein said DNA endonuclease is precomplexed with the gRNA, forming a Ribonucleoprotein (RNP) complex.

67. A composition comprising a guide RNA (gRNA) sequence that has a spacer sequence complementary to (i) a genomic sequence at, within, or near Wiskott-Aldrich syndrome (WAS) gene or (ii) a genomic sequence at, within, or near a safe harbor locus or a safe harbor site.

68. The composition of claim 67, wherein said safe harbor locus is selected from the group consisting of albumin gene, AAVS1 gene, HRPT gene, CCR5 gene, globin gene, TTR gene, TF gene, F9 gene, Alb gene, Gys2 gene and PCSK9 gene.

69. The composition of claim 67, wherein said safe harbor site is selected from the group consisting of the following regions: AAVS1 19q13.4-qter, HRPT 1q31.2, CCR5 3p21.31, Globin 1p15.4, TTR 18q12.1, TF 3q22.1, F9 Xq27.1, Alb 4q13.3, Gys2 12p12.1, and PCSK9 1p32.3.

70. The composition of claim 67, wherein said spacer sequence is 15 bases to 20 bases in length.

71. The composition of claim 67, wherein a complementarity between the spacer sequence to the genomic sequence is at least 80%, at least 85%, at least 90%, at least 950%, at least 96%, at least 97%, at least 98%, at least 99% or at least 100%.

72. The composition of claim 67 further comprising one or more of the following:
a deoxyribonucleic acid (DNA) endonuclease or an oligonucleotide encoding said DNA endonuclease; and
a donor template comprising a nucleic acid sequence of a WAS gene or functional derivative thereof.

73. The composition of claim 72, wherein said DNA endonuclease is an enzyme selected from the group consisting of any of those in Table 1, Table 2, and variants having at least 70% homology to any of those listed in Table 1 or Table 2.

74. The composition of claim 72, wherein said DNA endonuclease is Cas 9.

75. The composition of claim 72, wherein the oligonucleotide encoding said DNA endonuclease is codon optimized.

76. The composition of claim 72, wherein the oligonucleotide encoding said DNA endonuclease is a ribonucleic acid (RNA) sequence.

77. The composition of claim 77, wherein the RNA sequence encoding said DNA endonuclease is linked to the gRNA via a covalent bond.

78. The composition of claim 67 further comprising a liposome or lipid nanoparticle.

79. The composition of claim 72, wherein said DNA endonuclease is precomplexed with the gRNA, forming a Ribonucleoprotein (RNP) complex.

80. A kit comprising the composition of claim 59 further comprising instructions for use.

The application's sequence listing, which the Patent Office published only in electronic form, follows.

SEQUENCE LISTING (5454 sequences)

SEQ ID NO: 1 - protein, 1368 aa, Streptococcus pyogenes [sequence omitted]

SEQ ID NO: 2 - DNA, 4107 bp, Streptococcus pyogenes
atggataagaaatactcaataggcttagatatcggcacaaatagcgtcggatgggcggtgatcactgatgaatataaggttccgtctaaaaagttcaaggttctgggaaatacagaccgccacagtatcaaaaaaaatcttataggggctcttttatttgacagtggagagacagcggaagcgactcgtctcaaacggacagctcgtagaaggtatacacgtcggaagaatcgtatttgttatctacaggagattttttcaaatgagatggcgaaagtagatgatagtttctttcatcgacttgaagagtcttttttggtggaagaagacaagaagcatgaacgtcatcctatttttggaaatatagtagatgaagttgcttatcatgagaaatatccaactatctatcatctgcgaaaaaaattggtagattctactgataaagcggatttgcgcttaatctatttggccttagcgcatatgattaagtttcgtggtcattttttgattgagggagatttaaatcctgataatagtgatgtggacaaactatttatccagttggtacaaacctacaatcaattatttgaagaaaaccctattaacgcaagtggagtagatgctaaagcgattctttctgcacgattgagtaaatcaagacgattagaaaatctcattgctcagctccccggtgagaagaaaaatggcttatttgggaatctcattgctttgtcattgggtttgacccctaattttaaatcaaattttgatttggcagaagatgctaaattacagctttcaaaagatacttacgatgatgatttagataatttattggcgcaaattggagatcaatatgctgatttgtttttggcagctaagaatttatcagatgctattttactttcagatatcctaagagtaaatactgaaataactaaggctcccctatcagcttcaatgattaaacgctacgatgaacatcatcaagacttgactcttttaaaagctttagttcgacaacaacttccagaaaagtataaagaaatcttttttgatcaatcaaaaaacggatatgcaggttatattgatgggggagctagccaagaagaattttataaatttatcaaaccaattttagaaaaaatggatggtactgaggaattattggtgaaactaaatcgtgaagatttgctgcgcaagcaacggacctttgacaacggctctattccccatcaaattcacttgggtgagctgcatgctattttgagaagacaagaagacttttatccatttttaaaagacaatcgtgagaagattgaaaaaatcttgacttttcgaattccttattatgttggtccattggcgcgtggcaatagtcgttttgcatggatgactcggaagtctgaagaaacaattaccccatggaattttgaagaagttgtcgataaaggtgcttcagctcaatcatttattgaacgcatgacaaactttgataaaaatcttccaaatgaaaaagtactaccaaaacatagtttgctttatgagtattttacggtttataacgaattgacaaaggtcaaatatgttactgaaggaatgcgaaaaccagcatttctttcaggtgaacagaagaaagccattgttgatttactcttcaaaacaaatcgaaaagtaaccgttaagcaattaaaagaagattatttcaaaaaaatagaatgttttgatagtgttgaaatttcaggagttgaagatagatttaatgcttcattaggtacctaccatgatttgctaaaaattattaaagataaagattttttggataatgaagaaaatgaagatatcttagaggatattgttttaacattgaccttatttgaagatagggagatgattgaggaaagacttaaaacatatgctcacctctttgatgataaggtgatgaaacagcttaaacgtcgccgttatactggttggggacgtttgtctcgaaaattgattaatggtattagggataagcaatctggcaaaacaatattagattttttgaaatcagatggttttgccaatcgcaattttatgcagctgatccatgatgatagtttgacatttaaagaagacattcaaaaagcacaagtgtctggacaaggcgatagtttacatgaacatattgcaaatttagctggtagccctgctattaaaaaaggtattttacagactgtaaaagttgttgatgaattggtcaaagtaatggggcggcataagccagaaaatatcgttattgaaatggcacgtgaaaatcagacaactcaaaagggccagaaaaattcgcgagagcgtatgaaacgaatcgaagaaggtatcaaagaattaggaagtcagattcttaaagagcatcctgttgaaaatactcaattgcaaaatgaaaagctctatctctattatctccaaaatggaagagacatgtatgtggaccaagaattagatattaatcgtttaagtgattatgatgtcgatcacattgttccacaaagtttccttaaagacgattcaatagacaataaggtcttaacgcgttctgataaaaatcgtggtaaatcggataacgttccaagtgaagaagtagtcaaaaagatgaaaaactattggagacaacttctaaacgccaagttaatcactcaacgtaagtttgataatttaacgaaagctgaacgtggaggtttgagtgaacttgataaagctggttttatcaaacgccaattggttgaaactcgccaaatcactaagcatgtggcacaaattttggatagtcgcatgaatactaaatacgatgaaaatgataaacttattcgagaggttaaagtgattaccttaaaatctaaattagtttctgacttccgaaaagatttccaattctataaagtacgtgagattaacaattaccatcatgcccatgatgcgtatctaaatgccgtcgttggaactgctttgattaagaaatatccaaaacttgaatcggagtttgtctatggtgattataaagtttatgatgttcgtaaaatgattgctaagtctgagcaagaaataggcaaagcaaccgcaaaatatttcttttactctaatatcatgaacttcttcaaaacagaaattacacttgcaaatggagagattcgcaaacgccctctaatcgaaactaatggggaaactggagaaattgtctgggataaagggcgagattttgccacagtgcgcaaagtattgtccatgccccaagtcaatattgtcaagaaaacagaagtacagacaggcggattctccaaggagtcaattttaccaaaaagaaattcggacaagcttattgctcgtaaaaaagactgggatccaaaaaaatatggtggttttgatagtccaacggtagcttattcagtcctagtggttgctaaggtggaaaaagggaaatcgaagaagttaaaatccgttaaagagttactagggatcacaattatggaaagaagttcctttgaaaaaaatccgattgactttttagaagctaaaggatataaggaagttaaaaaagacttaatcattaaactacctaaatatagtctttttgagttagaaaacggtcgtaaacggatgctggctagtgccggagaattacaaaaaggaaatgagctggctctgccaagcaaatatgtgaattttttatatttagctagtcattatgaaaagttgaagggtagtccagaagataacgaacaaaaacaattgtttgtggagcagcataagcattatttagatgagattattgagcaaatcagtgaattttctaagcgtgttattttagcagatgccaatttagataaagttcttagtgcatataacaaacatagagacaaaccaatacgtgaacaagcagaaaatattattcatttatttacgttgacgaatcttggagctcccgctgcttttaaatattttgatacaacaattgatcgtaaacgatatacgtctacaaaagaagttttagatgccactcttatccatcaatccatcactggtctttatgaaacacgcattgatttgagtcagctaggaggtgactga

SEQ ID NO: 3 - DNA, 4107 bp, Streptococcus pyogenes
atggacaagaagtactccattgggctcgctatcggcacaaacagcgtcggctgggccgtcattacggacgagtacaaggtgccgagcaaaaaattcaaagttctgggcaataccgatcgccacagcataaagaagaacctcattggcgccctcctgttcgactccggggagacggccgaagccacgcggctcaaaagaacagcacggcgcagatatacccgcagaaagaatcggatctgctacctgcaggagatctttagtaatgagatggctaaggtggatgactctttcttccataggctggaggagtcctttttggtggaggaggataaaaagcacgagcgccacccaatctttggcaatatcgtggacgaggtggcgtaccatgaaaagtacccaaccatatatcatctgaggaagaagcttgtagacagtactgataaggctgacttgcggttgatctatctcgcgctggcgcatatgatcaaatttcggggacacttcctcatcgagggggacctgaacccagacaacagcgatgtcgacaaactctttatccaactggttcagacttacaatcagcttttcgaagagaacccgatcaacgcatccggagttgacgccaaagcaatcctgagcgctaggctgtccaaatcccggcggctcgaaaacctcatcgcacagctccctggggagaagaagaacggcctgtttggtaatcttatcgccctgtcactcgggctgacccccaactttaaatctaacttcgacctggccgaagatgccaagcttcaactgagcaaagacacctacgatgatgatctcgacaatctgctggcccagatcggcgaccagtacgcagacctttttttggcggcaaagaacctgtcagacgccattctgctgagtgatattctgcgagtgaacacggagatcaccaaagctccgctgagcgctagtatgatcaagcgctatgatgagcaccaccaagacttgactttgctgaaggcccttgtcagacagcaactgcctgagaagtacaaggaaattttcttcgatcagtctaaaaatggctacgccggatacattgacggcggagcaagccaggaggaattttacaaatttattaagcccatcttggaaaaaatggacggcaccgaggagctgctggtaaagcttaacagagaagatctgttgcgcaaacagcgcactttcgacaatggaagcatcccccaccagattcacctgggcgaactgcacgctatcctcaggcggcaagaggatttctacccctttttgaaagataacagggaaaagattgagaaaatcctcacatttcggataccctactatgtaggccccctcgcccggggaaattccagattcgcgtggatgactcgcaaatcagaagagaccatcactccctggaacttcgaggaagtcgtggataagggggcctctgcccagtccttcatcgaaaggatgactaactttgataaaaatctgcctaacgaaaaggtgcttcctaaacactctctgctgtacgagtacttcacagtttataacgagctcaccaaggtcaaatacgtcacagaagggatgagaaagccagcattcctgtctggagagcagaagaaagctatcgtggacctcctcttcaagacgaaccggaaagttaccgtgaaacagctcaaagaagactatttcaaaaagattgaatgtttcgactctgttgaaatcagcggagtggaggatcgcttcaacgcatccctgggaacgtatcacgatctcctgaaaatcattaaagacaaggacttcctggacaatgaggagaacgaggacattcttgaggacattgtcctcacccttacgttgtttgaagatagggagatgattgaagaacgcttgaaaacttacgctcatctcttcgacgacaaagtcatgaaacagctcaagaggcgccgatatacaggatgggggcggctgtcaagaaaactgatcaatgggatccgagacaagcagagtggaaagacaatcctggattttcttaagtccgatggatttgccaaccggaacttcatgcagttgatccatgatgactctctcacctttaaggaggacatccagaaagcacaagtttctggccagggggacagtcttcacgagcacatcgctaatcttgcaggtagcccagctatcaaaaagggaatactgcagaccgttaaggtcgtggatgaactcgtcaaagtaatgggaaggcataagcccgagaatatcgttatcgagatggcccgagagaaccaaactacccagaagggacagaagaacagtagggaaaggatgaagaggattgaagagggtataaaagaactggggtcccaaatccttaaggaacacccagttgaaaacacccagcttcagaatgagaagctctacctgtactacctgcagaacggcagggacatgtacgtggatcaggaactggacatcaatcggctctccgactacgacgtggctgctatcgtgccccagtcttttctcaaagatgattctattgataataaagtgttgacaagatccgataaagctagagggaagagtgataacgtcccctcagaagaagttgtcaagaaaatgaaaaattattggcggcagctgctgaacgccaaactgatcacacaacggaagttcgataatctgactaaggctgaacgaggtggcctgtctgagttggataaagccggcttcatcaaaaggcagcttgttgagacacgccagatcaccaagcacgtggcccaaattctcgattcacgcatgaacaccaagtacgatgaaaatgacaaactgattcgagaggtgaaagttattactctgaagtctaagctggtctcagatttcagaaaggactttcagttttataaggtgagagagatcaacaattaccaccatgcgcatgatgcctacctgaatgcagtggtaggcactgcacttatcaaaaaatatcccaagcttgaatctgaatttgtttacggagactataaagtgtacgatgttaggaaaatgatcgcaaagtctgagcaggaaataggcaaggccaccgctaagtacttcttttacagcaatattatgaattttttcaagaccgagattacactggccaatggagagattcggaagcgaccacttatcgaaacaaacggagaaacaggagaaatcgtgtgggacaagggtagggatttcgcgacagtccggaaggtcctgtccatgccgcaggtgaacatcgttaaaaagaccgaagtacagaccggaggcttctccaaggaaagtatcctcccgaaaaggaacagcgacaagctgatcgcacgcaaaaaagattgggaccccaagaaatacggcggattcgattctcctacagtcgcttacagtgtactggttgtggccaaagtggagaaagggaagtctaaaaaactcaaaagcgtcaaggaactgctgggcatcacaatcatggagcgatcaagcttcgaaaaaaaccccatcgactttctcgaggcgaaaggatataaagaggtcaaaaaagacctcatcattaagcttcccaagtactctctctttgagcttgaaaacggccggaaacgaatgctcgctagtgcgggcgagctgcagaaaggtaacgagctggcactgccctctaaatacgttaatttcttgtatctggccagccactatgaaaagctcaaagggtctcccgaagataatgagcagaagcagctgttcgtggaacaacacaaacactaccttgatgagatcatcgagcaaataagcgaattctccaaaagagtgatcctcgccgacgctaacctcgataaggtgctttctgcttacaataagcacagggataagcccatcagggagcaggcagaaaacattatccacttgtttactctgaccaacttgggcgcgcctgcagccttcaagtacttcgacaccaccatagacagaaagcggtacacctctacaaaggaggtcctggacgccacactgattcatcagtcaattacggggctctatgaaacaagaatcgacctctctcagctcggtggagactaa

SEQ ID NO: 4 - DNA, 4140 bp, Streptococcus pyogenes
atggacaagaagtactccattgggctcgatatcggcacaaacagcgtcggctgggccgtcattacggacgagtacaaggtgccgagcaaaaaattcaaagttctgggcaataccgatcgccacagcataaagaagaacctcattggcgccctcctgttcgactccggggagacggccgaagccacgcggctcaaaagaacagcacggcgcagatatacccgcagaaagaatcggatctgctacctgcaggagatctttagtaatgagatggctaaggtggatgactctttcttccataggctggaggagtcctttttggtggaggaggataaaaagcacgagcgccacccaatctttggcaatatcgtggacgaggtggcgtaccatgaaaagtacccaaccatatatcatctgaggaagaagcttgtagacagtactgataaggctgacttgcggttgatctatctcgcgctggcgcatatgatcaaatttcggggacacttcctcatcgagggggacctgaacccagacaacagcgatgtcgacaaactctttatccaactggttcagacttacaatcagcttttcgaagagaacccgatcaacgcatccggagttgacgccaaagcaatcctgagcgctaggctgtccaaatcccggcggctcgaaaacctcatcgcacagctccctggggagaagaagaacggcctgtttggtaatcttatcgccctgtcactcgggctgacccccaactttaaatctaacttcgacctggccgaagatgccaagcttcaactgagcaaagacacctacgatgatgatctcgacaatctgctggcccagatcggcgaccagtacgcagacctttttttggcggcaaagaacctgtcagacgccattctgctgagtgatattctgcgagtgaacacggagatcaccaaagctccgctgagcgctagtatgatcaagcgctatgatgagcaccaccaagacttgactttgctgaaggcccttgtcagacagcaactgcctgagaagtacaaggaaattttcttcgatcagtctaaaaatggctacgccggatacattgacggcggagcaagccaggaggaattttacaaatttattaagcccatcttggaaaaaatggacggcaccgaggagctgctggtaaagcttaacagagaagatctgttgcgcaaacagcgcactttcgacaatggaagcatcccccaccagattcacctgggcgaactgcacgctatcctcaggcggcaagaggatttctacccctttttgaaagataacagggaaaagattgagaaaatcctcacatttcggataccctactatgtaggccccctcgcccggggaaattccagattcgcgtggatgactcgcaaatcagaagagaccatcactccctggaacttcgaggaagtcgtggataagggggcctctgcccagtccttcatcgaaaggatgactaactttgataaaaatctgcctaacgaaaaggtgcttcctaaacactctctgctgtacgagtacttcacagtttataacgagctcaccaaggtcaaatacgtcacagaagggatgagaaagccagcattcctgtctggagagcagaagaaagctatcgtggacctcctcttcaagacgaaccggaaagttaccgtgaaacagctcaaagaagactatttcaaaaagattgaatgtttcgactctgttgaaatcagcggagtggaggatcgcttcaacgcatccctgggaacgtatcacgatctcctgaaaatcattaaagacaaggacttcctggacaatgaggagaacgaggacattcttgaggacattgtcctcacccttacgttgtttgaagatagggagatgattgaagaacgcttgaaaacttacgctcatctcttcgacgacaaagtcatgaaacagctcaagaggcgccgatatacaggatgggggcggctgtcaagaaaactgatcaatgggatccgagacaagcagagtggaaagacaatcctggattttcttaagtccgatggatttgccaaccggaacttcatgcagttgatccatgatgactctctcacctttaaggaggacatccagaaagcacaagtttctggccagggggacagtcttcacgagcacatcgctaatcttgcaggtagcccagctatcaaaaagggaatactgcagaccgttaaggtcgtggatgaactcgtcaaagtaatgggaaggcataagcccgagaatatcgttatcgagatggcccgagagaaccaaactacccagaagggacagaagaacagtagggaaaggatgaagaggattgaagagggtataaaagaactggggtcccaaatccttaaggaacacccagttgaaaacacccagcttcagaatgagaagctctacctgtactacctgcagaacggcagggacatgtacgtggatcaggaactggacatcaatcggctctccgactacgacgtggatcatatcgtgccccagtcttttctcaaagatgattctattgataataaagtgttgacaagatccgataaaaatagagggaagagtgataacgtcccctcagaagaagttgtcaagaaaatgaaaaattattggcggcagctgctgaacgccaaactgatcacacaacggaagttcgataatctgactaaggctgaacgaggtggcctgtctgagttggataaagccggcttcatcaaaaggcagcttgttgagacacgccagatcaccaagcacgtggcccaaattctcgattcacgcatgaacaccaagtacgatgaaaatgacaaactgattcgagaggtgaaagttattactctgaagtctaagctggtctcagatttcagaaaggactttcagttttataaggtgagagagatcaacaattaccaccatgcgcatgatgcctacctgaatgcagtggtaggcactgcacttatcaaaaaatatcccaagcttgaatctgaatttgtttacggagactataaagtgtacgatgttaggaaaatgatcgcaaagtctgagcaggaaataggcaaggccaccgctaagtacttcttttacagcaatattatgaattttttcaagaccgagattacactggccaatggagagattcggaagcgaccacttatcgaaacaaacggagaaacaggagaaatcgtgtgggacaagggtagggatttcgcgacagtccggaaggtcctgtccatgccgcaggtgaacatcgttaaaaagaccgaagtacagaccggaggcttctccaaggaaagtatcctcccgaaaaggaacagcgacaagctgatcgcacgcaaaaaagattgggaccccaagaaatacggcggattcgattctcctacagtcgcttacagtgtactggttgtggccaaagtggagaaagggaagtctaaaaaactcaaaagcgtcaaggaactgctgggcatcacaatcatggagcgatcaagcttcgaaaaaaaccccatcgactttctcgaggcgaaaggatataaagaggtcaaaaaagacctcatcattaagcttcccaagtactctctctttgagcttgaaaacggccggaaacgaatgctcgctagtgcgggcgagctgcagaaaggtaacgagctggcactgccctctaaatacgttaatttcttgtatctggccagccactatgaaaagctcaaagggtctcccgaagataatgagcagaagcagctgttcgtggaacaacacaaacactaccttgatgagatcatcgagcaaataagcgaattctccaaaagagtgatcctcgccgacgctaacctcgataaggtgctttctgcttacaataagcacagggataagcccatcagggagcaggcagaaaacattatccacttgtttactctgaccaacttgggcgcgcctgcagccttcaagtacttcgacaccaccatagacagaaagcggtacacctctacaaaggaggtcctggacgccacactgattcatcagtcaattacggggctctatgaaacaagaatcgacctctctcagctcggtggagacagcagggctgaccccaagaagaagaggaaggtgtga

SEQ ID NO: 5 - DNA, 4200 bp, Streptococcus pyogenes
atggacaagaagtactccattgggctcgatatcggcacaaacagcgtcggctgggccgtcattacggacgagtacaaggtgccgagcaaaaaattcaaagttctgggcaataccgatcgccacagcataaagaagaacctcattggcgccctcctgttcgactccggggagacggccgaagccacgcggctcaaaagaacagcacggcgcagatatacccgcagaaagaatcggatctgctacctgcaggagatctttagtaatgagatggctaaggtggatgactctttcttccataggctggaggagtcctttttggtggaggaggataaaaagcacgagcgccacccaatctttggcaatatcgtggacgaggtggcgtaccatgaaaagtacccaaccatatatcatctgaggaagaagcttgtagacagtactgataaggctgacttgcggttgatctatctcgcgctggcgcatatgatcaaatttcggggacacttcctcatcgagggggacctgaacccagacaacagcgatgtcgacaaactctttatccaactggttcagacttacaatcagcttttcgaagagaacccgatcaacgcatccggagttgacgccaaagcaatcctgagcgctaggctgtccaaatcccggcggctcgaaaacctcatcgcacagctccctggggagaagaagaacggcctgtttggtaatcttatcgccctgtcactcgggctgacccccaactttaaatctaacttcgacctggccgaagatgccaagcttcaactgagcaaagacacctacgatgatgatctcgacaatctgctggcccagatcggcgaccagtacgcagacctttttttggcggcaaagaacctgtcagacgccattctgctgagtgatattctgcgagtgaacacggagatcaccaaagctccgctgagcgctagtatgatcaagcgctatgatgagcaccaccaagacttgactttgctgaaggcccttgtcagacagcaactgcctgagaagtacaaggaaattttcttcgatcagtctaaaaatggctacgccggatacattgacggcggagcaagccaggaggaattttacaaatttattaagcccatcttggaaaaaatggacggcaccgaggagctgctggtaaagcttaacagagaagatctgttgcgcaaacagcgcactttcgacaatggaagcatcccccaccagattcacctgggcgaactgcacgctatcctcaggcggcaagaggatttctacccctttttgaaagataacagggaaaagattgagaaaatcctcacatttcggataccctactatgtaggccccctcgcccggggaaattccagattcgcgtggatgactcgcaaatcagaagagaccatcactccctggaacttcgaggaagtcgtggataagggggcctctgcccagtccttcatcgaaaggatgactaactttgataaaaatctgcctaacgaaaaggtgcttcctaaacactctctgctgtacgagtacttcacagtttataacgagctcaccaaggtcaaatacgtcacagaagggatgagaaagccagcattcctgtctggagagcagaagaaagctatcgtggacctcctcttcaagacgaaccggaaagttaccgtgaaacagctcaaagaagactatttcaaaaagattgaatgtttcgactctgttgaaatcagcggagtggaggatcgcttcaacgcatccctgggaacgtatcacgatctcctgaaaatcattaaagacaaggacttcctggacaatgaggagaacgaggacattcttgaggacattgtcctcacccttacgttgtttgaagatagggagatgattgaagaacgcttgaaaacttacgctcatctcttcgacgacaaagtcatgaaacagctcaagaggcgccgatatacaggatgggggcggctgtcaagaaaactgatcaatgggatccgagacaagcagagtggaaagacaatcctggattttcttaagtccgatggatttgccaaccggaacttcatgcagttgatccatgatgactctctcacctttaaggaggacatccagaaagcacaagtttctggccagggggacagtcttcacgagcacatcgctaatcttgcaggtagcccagctatcaaaaagggaatactgcagaccgttaaggtcgtggatgaactcgtcaaagtaatgggaaggcataagcccgagaatatcgttatcgagatggcccgagagaaccaaactacccagaagggacagaagaacagtagggaaaggatgaagaggattgaagagggtataaaagaactggggtcccaaatccttaaggaacacccagttgaaaacacccagcttcagaatgagaagctctacctgtactacctgcagaacggcagggacatgtacgtggatcaggaactggacatcaatcggctctccgactacgacgtggatcatatcgtgccccagtcttttctcaaagatgattctattgataataaagtgttgacaagatccgataaaaatagagggaagagtgataacgtcccctcagaagaagttgtcaagaaaatgaaaaattattggcggcagctgctgaacgccaaactgatcacacaacggaagttcgataatctgactaaggctgaacgaggtggcctgtctgagttggataaagccggcttcatcaaaaggcagcttgttgagacacgccagatcaccaagcacgtggcccaaattctcgattcacgcatgaacaccaagtacgatgaaaatgacaaactgattcgagaggtgaaagttattactctgaagtctaagctggtctcagatttcagaaaggactttcagttttataaggtgagagagatcaacaattaccaccatgcgcatgatgcctacctgaatgcagtggtaggcactgcacttatcaaaaaatatcccaagcttgaatctgaatttgtttacggagactataaagtgtacgatgttaggaaaatgatcgcaaagtctgagcaggaaataggcaaggccaccgctaagtacttcttttacagcaatattatgaattttttcaagaccgagattacactggccaatggagagattcggaagcgaccacttatcgaaacaaacggagaaacaggagaaatcgtgtgggacaagggtagggatttcgcgacagtccggaaggtcctgtccatgccgcaggtgaacatcgttaaaaagaccgaagtacagaccggaggcttctccaaggaaagtatcctcccgaaaaggaacagcgacaagctgatcgcacgcaaaaaagattgggaccccaagaaatacggcggattcgattctcctacagtcgcttacagtgtactggttgtggccaaagtggagaaagggaagtctaaaaaactcaaaagcgtcaaggaactgctgggcatcacaatcatggagcgatcaagcttcgaaaaaaaccccatcgactttctcgaggcgaaaggatataaagaggtcaaaaaagacctcatcattaagcttcccaagtactctctctttgagcttgaaaacggccggaaacgaatgctcgctagtgcgggcgagctgcagaaaggtaacgagctggcactgccctctaaatacgttaatttcttgtatctggccagccactatgaaaagctcaaagggtctcccgaagataatgagcagaagcagctgttcgtggaacaacacaaacactaccttgatgagatcatcgagcaaataagcgaattctccaaaagagtgatcctcgccgacgctaacctcgataaggtgctttctgcttacaataagcacagggataagcccatcagggagcaggcagaaaacattatccacttgtttactctgaccaacttgggcgcgcctgcagccttcaagtacttcgacaccaccatagacagaaagcggtacacctctacaaaggaggtcctggacgccacactgattcatcagtcaattacggggctctatgaaacaagaatcgacctctctcagctcggtggagacgcggccgcagatccaaaaaagaagagaaaggtagatccaaaaaagaagagaaaggtagatccaaaaaagaagagaaaggtagatacggccgcatag

SEQ ID NO: 6 - DNA, 4326 bp, Streptococcus pyogenes
atggacaagaagtactccattgggctcgctatcggcacaaacagcgtcggctgggccgtcattacggacgagtacaaggtgccgagcaaaaaattcaaagttctgggcaataccgatcgccacagcataaagaagaacctcattggcgccctcctgttcgactccggggagacggccgaagccacgcggctcaaaagaacagcacggcgcagatatacccgcagaaagaatcggatctgctacctgcaggagatctttagtaatgagatggctaaggtggatgactctttcttccataggctggaggagtcctttttggtggaggaggataaaaagcacgagcgccacccaatctttggcaatatcgtggacgaggtggcgtaccatgaaaagtacccaaccatatatcatctgaggaagaagcttgtagacagtactgataaggctgacttgcggttgatctatctcgcgctggcgcatatgatcaaatttcggggacacttcctcatcgagggggacctgaacccagacaacagcgatgtcgacaaactctttatccaactggttcagacttacaatcagcttttcgaagagaacccgatcaacgcatccggagttgacgccaaagcaatcctgagcgctaggctgtccaaatcccggcggctcgaaaacctcatcgcacagctccctggggagaagaagaacggcctgtttggtaatcttatcgccctgtcactcgggctgacccccaactttaaatctaacttcgacctggccgaagatgccaagcttcaactgagcaaagacacctacgatgatgatctcgacaatctgctggcccagatcggcgaccagtacgcagacctttttttggcggcaaagaacctgtcagacgccattctgctgagtgatattctgcgagtgaacacggagatcaccaaagctccgctgagcgctagtatgatcaagcgctatgatgagcaccaccaagacttgactttgctgaaggcccttgtcagacagcaactgcctgagaagtacaaggaaattttcttcgatcagtctaaaaatggctacgccggatacattgacggcggagcaagccaggaggaattttacaaatttattaagcccatcttggaaaaaatggacggcaccgaggagctgctggtaaagcttaacagagaagatctgttgcgcaaacagcgcactttcgacaatggaagcatcccccaccagattcacctgggcgaactgcacgctatcctcaggcggcaagaggatttctacccctttttgaaagataacagggaaaagattgagaaaatcctcacatttcggataccctactatgtaggccccctcgcccggggaaattccagattcgcgtggatgactcgcaaatcagaagagaccatcactccctggaacttcgaggaagtcgtggataagggggcctctgcccagtccttcatcgaaaggatgactaactttgataaaaatctgcctaacgaaaaggtgcttcctaaacactctctgctgtacgagtacttcacagtttataacgagctcaccaaggtcaaatacgtcacagaagggatgagaaagccagcattcctgtctggagagcagaagaaagctatcgtggacctcctcttcaagacgaaccggaaagttaccgtgaaacagctcaaagaagactatttcaaaaagattgaatgtttcgactctgttgaaatcagcggagtggaggatcgcttcaacgcatccctgggaacgtatcacgatctcctgaaaatcattaaagacaaggacttcctggacaatgaggagaacgaggacattcttgaggacattgtcctcacccttacgttgtttgaagatagggagatgattgaagaacgcttgaaaacttacgctcatctcttcgacgacaaagtcatgaaacagctcaagaggcgccgatatacaggatgggggcggctgtcaagaaaactgatcaatgggatccgagacaagcagagtggaaagacaatcctggattttcttaagtccgatggatttgccaaccggaacttcatgcagttgatccatgatgactctctcacctttaaggaggacatccagaaagcacaagtttctggccagggggacagtcttcacgagcacatcgctaatcttgcaggtagcccagctatcaaaaagggaatactgcagaccgttaaggtcgtggatgaactcgtcaaagtaatgggaaggcataagcccgagaatatcgttatcgagatggcccgagagaaccaaactacccagaagggacagaagaacagtagggaaaggatgaagaggattgaagagggtataaaagaactggggtcccaaatccttaaggaacacccagttgaaaacacccagcttcagaatgagaagctctacctgtactacctgcagaacggcagggacatgtacgtggatcaggaactggacatcaatcggctctccgactacgacgtggctgctatcgtgccccagtcttttctcaaagatgattctattgataataaagtgttgacaagatccgataaagctagagggaagagtgataacgtcccctcagaagaagttgtcaagaaaatgaaaaattattggcggcagctgctgaacgccaaactgatcacacaacggaagttcgataatctgactaaggctgaacgaggtggcctgtctgagttggataaagccggcttcatcaaaaggcagcttgttgagacacgccagatcaccaagcacgtggcccaaattctcgattcacgcatgaacaccaagtacgatgaaaatgacaaactgattcgagaggtgaaagttattactctgaagtctaagctggtctcagatttcagaaaggactttcagttttataaggtgagagagatcaacaattaccaccatgcgcatgatgcctacctgaatgcagtggtaggcactgcacttatcaaaaaatatcccaagcttgaatctgaatttgtttacggagactataaagtgtacgatgttaggaaaatgatcgcaaagtctgagcaggaaataggcaaggccaccgctaagtacttcttttacagcaatattatgaattttttcaagaccgagattacactggccaatggagagattcggaagcgaccacttatcgaaacaaacggagaaacaggagaaatcgtgtgggacaagggtagggatttcgcgacagtccggaaggtcctgtccatgccgcaggtgaacatcgttaaaaagaccgaagtacagaccggaggcttctccaaggaaagtatcctcccgaaaaggaacagcgacaagctgatcgcacgcaaaaaagattgggaccccaagaaatacggcggattcgattctcctacagtcgcttacagtgtactggttgtggccaaagtggagaaagggaagtctaaaaaactcaaaagcgtcaaggaactgctgggcatcacaatcatggagcgatcaagcttcgaaaaaaaccccatcgactttctcgaggcgaaaggatataaagaggtcaaaaaagacctcatcattaagcttcccaagtactctctctttgagcttgaaaacggccggaaacgaatgctcgctagtgcgggcgagctgcagaaaggtaacgagctggcactgccctctaaatacgttaatttcttgtatctggccagccactatgaaaagctcaaagggtctcccgaagataatgagcagaagcagctgttcgtggaacaacacaaacactaccttgatgagatcatcgagcaaataagcgaattctccaaaagagtgatcctcgccgacgctaacctcgataaggtgctttctgcttacaataagcacagggataagcccatcagggagcaggcagaaaacattatccacttgtttactctgaccaacttgggcgcgcctgcagccttcaagtacttcgacaccaccatagacagaaagcggtacacctctacaaaggaggtcctggacgccacactgattcatcagtcaattacggggctctatgaaacaagaatcgacctctctcagctcggtggagacagcagggctgaccccaagaagaagaggaaggtggaggccagcggttccggacgggctgacgcattggacgattttgatctggatatgctgggaagtgacgccctcgatgattttgaccttgacatgcttggttcggatgcccttgatgactttgacctcgacatgctcggcagtgacgcccttgatgatttcgacctggacatgctgattaactctagatga

SEQ ID NO: 7 - DNA, 4359 bp, Streptococcus pyogenes
atgcccaagaagaagaggaaggtgggaagggggatggacaagaagtactccattgggctcgctatcggcacaaacagcgtcggctgggccgtcattacggacgagtacaaggtgccgagcaaaaaattcaaagttctgggcaataccgatcgccacagcataaagaagaacctcattggcgccctcctgttcgactccggggagacggccgaagccacgcggctcaaaagaacagcacggcgcagatatacccgcagaaagaatcggatctgctacctgcaggagatctttagtaatgagatggctaaggtggatgactctttcttccataggctggaggagtcctttttggtggaggaggataaaaagcacgagcgccacccaatctttggcaatatcgtggacgaggtggcgtaccatgaaaagtacccaaccatatatcatctgaggaagaagcttgtagacagtactgataaggctgacttgcggttgatctatctcgcgctggcgcatatgatcaaatttcggggacacttcctcatcgagggggacctgaacccagacaacagcgatgtcgacaaactctttatccaactggttcagacttacaatcagcttttcgaagagaacccgatcaacgcatccggagttgacgccaaagcaatcctgagcgctaggctgtccaaatcccggcggctcgaaaacctcatcgcacagctccctggggagaagaagaacggcctgtttggtaatcttatcgccctgtcactcgggctgacccccaactttaaatctaacttcgacctggccgaagatgccaagcttcaactgagcaaagacacctacgatgatgatctcgacaatctgctggcccagatcggcgaccagtacgcagacctttttttggcggcaaagaacctgtcagacgccattctgctgagtgatattctgcgagtgaacacggagatcaccaaagctccgctgagcgctagtatgatcaagcgctatgatgagcaccaccaagacttgactttgctgaaggcccttgtcagacagcaactgcctgagaagtacaaggaaattttcttcgatcagtctaaaaatggctacgccggatacattgacggcggagcaagccaggaggaattttacaaatttattaagcccatcttggaaaaaatggacggcaccgaggagctgctggtaaagcttaacagagaagatctgttgcgcaaacagcgcactttcgacaatggaagcatcccccaccagattcacctgggcgaactgcacgctatcctcaggcggcaagaggatttctacccctttttgaaagataacagggaaaagattgagaaaatcctcacatttcggataccctactatgtaggccccctcgcccggggaaattccagattcgcgtggatgactcgcaaatcagaagagaccatcactccctggaacttcgaggaagtcgtggataagggggcctctgcccagtccttcatcgaaaggatgactaactttgataaaaatctgcctaacgaaaaggtgcttcctaaacactctctgctgtacgagtacttcacagtttataacgagctcaccaaggtcaaatacgtcacagaagggatgagaaagccagcattcctgtctggagagcagaagaaagctatcgtggacctcctcttcaagacgaaccggaaagttaccgtgaaacagctcaaagaagactatttcaaaaagattgaatgtttcgactctgttgaaatcagcggagtggaggatcgcttcaacgcatccctgggaacgtatcacgatctcctgaaaatcattaaagacaaggacttcctggacaatgaggagaacgaggacattcttgaggacattgtcctcacccttacgttgtttgaagatagggagatgattgaagaacgcttgaaaacttacgctcatctcttcgacgacaaagtcatgaaacagctcaagaggcgccgatatacaggatgggggcggctgtcaagaaaactgatcaatgggatccgagacaagcagagtggaaagacaatcctggattttcttaagtccgatggatttgccaaccggaacttcatgcagttgatccatgatgactctctcacctttaaggaggacatccagaaagcacaagtttctggccagggggacagtcttcacgagcacatcgctaatcttgcaggtagcccagctatcaaaaagggaatactgcagaccgttaaggtcgtggatgaactcgtcaaagtaatgggaaggcataagcccgagaatatcgttatcgagatggcccgagagaaccaaactacccagaagggacagaagaacagtagggaaaggatgaagaggattgaagagggtataaaagaactggggtcccaaatccttaaggaacacccagttgaaaacacccagcttcagaatgagaagctctacctgtactacctgcagaacggcagggacatgtacgtggatcaggaactggacatcaatcggctctccgactacgacgtggctgctatcgtgccccagtcttttctcaaagatgattctattgataataaagtgttgacaagatccgataaagctagagggaagagtgataacgtcccctcagaagaagttgtcaagaaaatgaaaaattattggcggcagctgctgaacgccaaactgatcacacaacggaagttcgataatctgactaaggctgaacgaggtggcctgtctgagttggataaagccggcttcatcaaaaggcagcttgttgagacacgccagatcaccaagcacgtggcccaaattctcgattcacgcatgaacaccaagtacgatgaaaatgacaaactgattcgagaggtgaaagttattactctgaagtctaagctggtctcagatttcagaaaggactttcagttttataaggtgagagagatcaacaattaccaccatgcgcatgatgcctacctgaatgcagtggtaggcactgcacttatcaaaaaatatcccaagcttgaatctgaatttgtttacggagactataaagtgtacgatgttaggaaaatgatcgcaaagtctgagcaggaaataggcaaggccaccgctaagtacttcttttacagcaatattatgaattttttcaagaccgagattacactggccaatggagagattcggaagcgaccacttatcgaaacaaacggagaaacaggagaaatcgtgtgggacaagggtagggatttcgcgacagtccggaaggtcctgtccatgccgcaggtgaacatcgttaaaaagaccgaagtacagaccggaggcttctccaaggaaagtatcctcccgaaaaggaacagcgacaagctgatcgcacgcaaaaaagattgggaccccaagaaatacggcggattcgattctcctacagtcgcttacagtgtactggttgtggccaaagtggagaaagggaagtctaaaaaactcaaaagcgtcaaggaactgctgggcatcacaatcatggagcgatcaagcttcgaaaaaaaccccatcgactttctcgaggcgaaaggatataaagaggtcaaaaaagacctcatcattaagcttcccaagtactctctctttgagcttgaaaacggccggaaacgaatgctcgctagtgcgggcgagctgcagaaaggtaacgagctggcactgccctctaaatacgttaatttcttgtatctggccagccactatgaaaagctcaaagggtctcccgaagataatgagcagaagcagctgttcgtggaacaacacaaacactaccttgatgagatcatcgagcaaataagcgaattctccaaaagagtgatcctcgccgacgctaacctcgataaggtgctttctgcttacaataagcacagggataagcccatcagggagcaggcagaaaacattatccacttgtttactctgaccaacttgggcgcgcctgcagccttcaagtacttcgacaccaccatagacagaaagcggtacacctctacaaaggaggtcctggacgccacactgattcatcagtcaattacggggctctatgaaacaagaatcgacctctctcagctcggtggagacagcagggctgaccccaagaagaagaggaaggtggaggccagcggttccggacgggctgacgcattggacgattttgatctggatatgctgggaagtgacgccctcgatgattttgaccttgacatgcttggttcggatgcccttgatgactttgacctcgacatgctcggcagtgacgcccttgatgatttcgacctggacatgctgattaactctagatga

SEQ ID NO: 8 - protein, 1409 aa, Streptococcus thermophiles
MLFNKCIIISINLDFSNKEKCMTKPYSIGLDIGTNSVGWAVITDNYKVPSKKMKVLGNTSKKYIKKNLLGVLLFDSGITAEGRRLKRTARRRYTRRRNRILYLQEIFSTEMATLDDAFFQRLDDSFLVPDDKRDSKYPIFGNLVEEKVYHDEFPTIYHLRKYLADSTKKADLRLVYLALAHMIKYRGHFLIEGEFNSKNNDIQKNFQDFLDTYNAIFESDLSLENSKQLEEIVKDKISKLEKKDRILKLFPGEKNSGIFSEFLKLIVGNQADFRKCFNLDEKASLHFSKESYDEDLETLLGYIGDDYSDVFLKAKKLYDAILLSGFLTVTDNETEAPLSSAMIKRYNEHKEDLALLKEYIRNISLKTYNEVFKDDTKNGYAGYIDGKTNQEDFYVYLKNLLAEFEGADYFLEKIDREDFLRKQRTFDNGSIPYQIHLQEMRAILDKQAKFYPFLAKNKERIEKILTFRIPYYVGPLARGNSDFAWSIRKRNEKITPWNFEDVIDKESSAEAFINRMTSFDLYLPEEKVLPKHSLLYETFNVYNELTKVRFIAESMRDYQFLDSKQKKDIVRLYFKDKRKVTDKDIIEYLHAIYGYDGIELKGIEKQFNSSLSTYHDLLNIINDKEFLDDSSNEAIIEEIIHTLTIFEDREMIKQRLSKFENIFDKSVLKKLSRRHYTGWGKLSAKLINGIRDEKSGNTILDYLIDDGISNRNFMQLIHDDALSFKKKIQKAQIIGDEDKGNIKEVVKSLPGSPAIKKGILQSIKIVDELVKVMGGRKPESIVVEMARENQYTNQGKSNSQQRLKRLEKSLKELGSKILKENIPAKLSKIDNNALQNDRLYLYYLQNGKDMYTGDDLDIDRLSNYDIDHIIPQAFLKDNSIDNKVLVSSASNRGKSDDFPSLEVVKKRKTFWYQLLKSKLISQRKFDNLTKAERGGLLPEDKAGFIQRQLVETRQITKHVARLLDEKFNNKKDENNRAVRTVKIITLKSTLVSQFRKDFELYKVREINDFHHAHDAYLNAVIASALLKKYPKLEPEFVYGDYPKYNSFRERKSATEKVYFYSNIMNIFKKSISLADGRVIERPLIEVNEETGESVWNKESDLATVRRVLSYPQVNVVKKVEEQNHGLDRGKPKGLFNANLSSKPKPNSNENLVGAKEYLDPKKYGGYAGISNSFAVLVKGTIEKGAKKKITNVLEFQGISILDRINYRKDKLNFLLEKGYKDIELIIELPKYSLFELSDGSRRMLASILSTNNKRGEIHKGNQIFLSQKFVKLLYHAKRISNTINENHRKYVENHKKEFEELFYYILEFNENYVGAKKNGKLLNSAFQSWQNHSIDELCSSFIGPTGSERKGLFELTSRGSAADFEFLGVKIPRYRDYTPSSLLKDATLIHQSVTGLYETRIDLAKLGEG

SEQ ID NO: 9 - DNA, 4167 bp, Streptococcus thermophiles
atgactaagccatactcaattggacttgatattggaacgaatagtgttggatgggctgtaataactgataattacaaggttccgtctaaaaaaatgaaagtcttaggaaatacgagtaaaaagtatatcaaaaagaacctgttaggtgtattactctttgactctggaatcacagcagaaggaagaagattgaagcgtactgcaagaagacgttatactagacgccgtaatcgtatcctttatttgcaggaaatttttagcacggagatggctacattagatgatgctttctttcaaagacttgacgattcgtttttagttcctgatgataaacgtgatagtaagtatccgatatttggaaacttagtagaagaaaaagtctatcatgatgaatttccaactatctatcatttaaggaaatatttagcagatagtactaaaaaagcagatttgcgtctagtttatcttgcattggctcatatgattaaatatagaggtcacttcttaattgaaggagagtttaattcaaaaaataatgatattcagaagaattttcaagactttttggacacttataatgctatttttgaatcggatttatcacttgagaatagtaaacaacttgaggaaattgttaaagataagattagtaaattagaaaagaaagatcgtattttaaaactcttccctggggagaagaattcggggattttttcagagtttctaaagttgattgtaggaaatcaagctgattttaggaaatgttttaatttagacgaaaaagcctccttacatttttccaaagaaagctatgatgaagatttagagactttgttaggttatattggagatgattacagtgatgtctttctcaaagcaaagaaactttatgatgctattcttttatcgggttttctgactgtaactgataatgagacagaagcacctctctcttctgctatgataaagcgatataatgaacacaaagaagatttagcgttactaaaggaatatataagaaatatttcactaaaaacgtataatgaagtatttaaagatgacaccaaaaatggttatgctggttatattgatggaaaaacaaatcaggaagatttctacgtatatctaaaaaacctattggctgaatttgaaggtgcggattattttcttgaaaaaattgatcgagaagattttttgagaaagcaacgtacatttgacaatggttcgataccatatcagattcatcttcaagaaatgagagcaattcttgataagcaagctaaattttatcctttcttggctaaaaataaagaaagaatcgagaagattttaaccttccgaattccttattatgtaggtccacttgcgagagggaatagtgattttgcctggtcaataagaaaacgaaatgaaaaaattacaccttggaattttgaggacgttattgacaaagaatcttcggcagaggctttcattaatcgaatgactagttttgatttgtatttgccagaagagaaggtacttccaaagcatagtctcttatacgaaacttttaatgtatataatgaattaacaaaagttagatttattgccgaaagtatgagagattatcaatttttagatagtaagcagaagaaagatattgttagactttattttaaagataaaaggaaagttactgataaggatattattgaatatttacatgcaatttatgggtatgatggaattgaattaaaaggcatagagaaacagtttaattctagtttatctacttatcacgatcttttaaatattattaatgataaagagtttttggatgatagttcaaatgaagcgattatcgaagaaattatccatactttgacaatttttgaagatagagagatgataaaacaacgtctttcaaaatttgagaatatattcgataaatccgttttgaaaaagttatctcgtagacattacactggctggggtaagttatctgctaagcttattaatggtattcgagatgaaaaatctggtaatactattcttgattacttaattgatgatggtatttctaaccgtaatttcatgcaacttattcacgatgatgctctttcttttaaaaagaagatacagaaagcacaaattattggtgacgaagataaaggtaatattaaagaggtcgttaagtctttgccaggtagtcctgcgattaaaaaaggtattttacaaagcataaaaattgtagatgaattggtcaaagtaatgggaggaagaaaacccgagtcaattgttgttgagatggctcgtgaaaatcaatataccaatcaaggtaagtctaattcccaacaacgcttgaaacgtttagaaaaatctctcaaagagttaggtagtaagatacttaaggaaaatattcctgcaaaactttctaaaatagacaataacgcacttcaaaatgatcgactttacttatactatcttcaaaatggaaaagatatgtataccggagatgatttagatattgatagattaagtaattatgatattgatcatattattcctcaagcttttttgaaagataattctattgacaataaagtacttgtttcatctgctagtaaccgtggtaaatcagatgattttccaagtttagaggttgtcaaaaaaagaaagacattttggtatcaattattgaaatcaaaattaatttctcaacgaaaatttgataatctgacaaaagctgaacggggaggattgttacctgaggacaaagctggttttattcaacgccagttggttgaaacacgtcaaataacaaaacatgtagctcgtttacttgatgagaaatttaataataaaaaagatgaaaataatagagcggtacgaacagtaaaaattattaccttgaaatctaccttagtttctcaatttcgtaaggattttgaactttataaagttcgtgaaatcaatgattttcatcatgctcatgatgcttacttgaatgccgttatagcaagtgctttacttaagaaataccctaaactagagccagaatttgtgtacggtgattatccaaaatacaatagttttagagaaagaaagtccgctacagaaaaggtatatttctattcaaatatcatgaatatctttaaaaaatctatttctttagctgatggtagagttattgaaagaccacttattgaggtaaatgaggagaccggcgaatccgtttggaataaagaatctgatttagcaactgtaaggagagtactctcttatccgcaagtaaatgttgtgaaaaaagttgaggaacagaatcacggattggatagaggaaaaccaaagggattgtttaatgcaaatctttcctcaaagccaaaaccaaatagtaatgaaaatttagtaggtgctaaagagtatcttgaccccaaaaagtatggggggtatgctggaatttctaattcttttgctgttcttgttaaagggacaattgaaaaaggtgctaagaaaaaaataacaaatgtactagaatttcaaggtatttctattttagataggattaattatagaaaagataaacttaattttttacttgaaaaaggttataaagatattgagttaattattgaactacctaaatatagtttatttgaactttcagatggttcacgtcgtatgttggctagtattttgtcaacgaataataagaggggagagattcacaaaggaaatcagatttttctttcacagaagtttgtgaaattactttatcatgctaagagaataagtaacacaattaatgagaatcatagaaaatatgttgagaaccataaaaaagagtttgaagaattattttactacattcttgagtttaatgagaattatgttggagctaaaaagaatggtaaacttttaaactctgcctttcaatcttggcaaaatcatagtatagatgaactctgtagtagttttataggacctaccggaagtgaaagaaaggggctatttgaattaacctctcgtggaagtgctgctgattttgaatttttaggtgttaaaattccaaggtatagagactataccccatcatccctattaaaagatgccacacttattcatcaatctgttacaggcctctatgaaacacgaatagaccttgccaaactaggagagggttaa

SEQ ID NO: 10 - DNA, 3366 bp, Streptococcus thermophilus
atgagcgacctggtgctgggcctggacatcggcatcggcagcgtgggcgtgggcatcctgaacaaggtgaccggcgagatcatccacaagaacagtcgcatcttccctgctgctcaggctgagaacaacctggtgcgccgcaccaaccgccagggtcgccggcttgctcgccgcaagaagcaccggcgcgtgcgcctgaaccgcctgttcgaggagagcggcctgatcaccgacttcaccaagatcagcatcaacctgaacccctaccagctgcgcgtgaagggcctgaccgacgagctgagcaacgaggagctgttcatcgccctgaagaacatggtgaagcaccgcggcatcagctacctggacgacgccagcgacgacggcaacagcagcgtgggcgactacgcccagatcgtgaaggagaacagcaagcagctggagaccaagacccccggccagatccagctggagcgctaccagacctacggccagctgcgcggcgacttcaccgtggagaaggacggcaagaagcaccgcctgatcaacgtgttccccaccagcgcctaccgcagcgaggccctgcgcatcctgcagacccagcaggagttcaacccccagatcaccgacgagttcatcaaccgctacctggagatcctgaccggcaagcgcaagtactaccacggccccggcaacgagaagagccgcaccgactacggccgctaccgcaccagcggcgagaccctggacaacatcttcggcatcctgatcggcaagtgcaccttctaccccgacgagttccgcgccgccaaggccagctacaccgcccaggagttcaacctgctgaacgacctgaacaacctgaccgtgcccaccgagaccaagaagctgagcaaggagcagaagaaccagatcatcaactacgtgaagaacgagaaggccatgggccccgccaagctgttcaagtacatcgccaagctgctgagctgcgacgtggccgacatcaagggctaccgcatcgacaagagcggcaaggccgagatccacaccttcgaggcctaccgcaagatgaagaccctggagaccctggacatcgagcagatggaccgcgagaccctggacaagctggcctacgtgctgaccctgaacaccgagcgcgagggcatccaggaggccctggagcacgagttcgccgacggcagcttcagccagaagcaggtggacgagctggtgcagttccgcaaggccaacagcagcatcttcggcaagggctggcacaacttcagcgtgaagctgatgatggagctgatccccgagctgtacgagaccagcgaggagcagatgaccatcctgacccgcctgggcaagcagaagaccaccagcagcagcaacaagaccaagtacatcgacgagaagctgctgaccgaggagatctacaaccccgtggtggccaagagcgtgcgccaggccatcaagatcgtgaacgccgccatcaaggagtacggcgacttcgacaacatcgtgatcgagatggcccgcgagaccaacgaggacgacgagaagaaggccatccagaagatccagaaggccaacaaggacgagaaggacgccgccatgctgaaggccgccaaccagtacaacggcaaggccgagctgccccacagcgtgttccacggccacaagcagctggccaccaagatccgcctgtggcaccagcagggcgagcgctgcctgtacaccggcaagaccatcagcatccacgacctgatcaacaacagcaaccagttcgaggtggaccacatcctgcccctgagcatcaccttcgacgacagcctggccaacaaggtgctggtgtacgccaccgccaaccaggagaagggccagcgcaccccctaccaggccctggacagcatggacgacgcctggagcttccgcgagctgaaggccttcgtgcgcgagagcaagaccctgagcaacaagaagaaggagtacctgctgaccgaggaggacatcagcaagttcgacgtgcgcaagaagttcatcgagcgcaacctggtggacacccgctacgccagccgcgtggtgctgaacgccctgcaggagcacttccgcgcccacaagatcgacaccaaggtgagcgtggtgcgcggccagttcaccagccagctgcgccgccactggggcatcgagaagacccgcgacacctaccaccaccacgccgtggacgccctgatcattgcggcttctagccagctgaacctgtggaagaagcagaagaacaccctggtgagctacagcgaggaccagctgctggacatcgagaccggcgagctgatcagcgacgacgagtacaaggagagcgtgttcaaggccccctaccagcacttcgtggacaccctgaagagcaaggagttcgaggacagcatcctgttcagctaccaggtggacagcaagttcaaccgcaagatcagcgacgccaccatctacgccacccgccaggccaaggtgggcaaggacaaggccgacgagacctacgtgctgggcaagatcaaggacatctacacccaggacggctacgacgccttcatgaagatctacaagaaggacaagagcaagttcctgatgtaccgccacgacccccagaccttcgagaaggtgatcgagcccatcctggagaactaccccaacaagcagatcaacgataaaggcaaggaggtgccctgcaaccccttcctgaagtacaaggaggagcacggctacatccgcaagtacagcaagaagggcaacggccccgagatcaagagcctgaagtactacgacagcaagctgggcaaccacatcgacatcacccccaaggacagcaacaacaaggtggtgctgcagagcgtgagcccctggcgcgccgacgtgtacttcaacaagaccaccggcaagtacgagatcctgggcctgaagtacgccgacctgcagtttgataagggcaccggcacctacaagatcagccaggagaagtacaacgacatcaagaagaaggagggcgtggacagcgacagcgagttcaagttcaccctgtacaagaacgaccttctgctggtgaaggacaccgagaccaaggagcaacagctgttccgcttcctgagccgcaccatgcccaagcagaagcactacgtggagctgaagccctacgacaagcagaagttcgagggcggcgaggccctgatcaaggtgctgggcaacgtggccaacagcggccagtgcaagaagggcctgggcaagagcaacatcagcatctacaaggtgcgcaccgacgtgctgggcaaccagcacatcatcaagaacgagggcgacaagcccaagctggacttctaa

SEQ ID NO: 11 - DNA, 3366 bp, Streptococcus thermophilus
atgagcgacctggtgctgggcctggccatcggcatcggcagcgtgggcgtgggcatcctgaacaaggtgaccggcgagatcatccacaagaacagtcgcatcttccctgctgctcaggctgagaacaacctggtgcgccgcaccaaccgccagggtcgccggcttgctcgccgcaagaagcaccggcgcgtgcgcctgaaccgcctgttcgaggagagcggcctgatcaccgacttcaccaagatcagcatcaacctgaacccctaccagctgcgcgtgaagggcctgaccgacgagctgagcaacgaggagctgttcatcgccctgaagaacatggtgaagcaccgcggcatcagctacctggacgacgccagcgacgacggcaacagcagcgtgggcgactacgcccagatcgtgaaggagaacagcaagcagctggagaccaagacccccggccagatccagctggagcgctaccagacctacggccagctgcgcggcgacttcaccgtggagaaggacggcaagaagcaccgcctgatcaacgtgttccccaccagcgcctaccgcagcgaggccctgcgcatcctgcagacccagcaggagttcaacccccagatcaccgacgagttcatcaaccgctacctggagatcctgaccggcaagcgcaagtactaccacggccccggcaacgagaagagccgcaccgactacggccgctaccgcaccagcggcgagaccctggacaacatcttcggcatcctgatcggcaagtgcaccttctaccccgacgagttccgcgccgccaaggccagctacaccgcccaggagttcaacctgctgaacgacctgaacaacctgaccgtgcccaccgagaccaagaagctgagcaaggagcagaagaaccagatcatcaactacgtgaagaacgagaaggccatgggccccgccaagctgttcaagtacatcgccaagctgctgagctgcgacgtggccgacatcaagggctaccgcatcgacaagagcggcaaggccgagatccacaccttcgaggcctaccgcaagatgaagaccctggagaccctggacatcgagcagatggaccgcgagaccctggacaagctggcctacgtgctgaccctgaacaccgagcgcgagggcatccaggaggccctggagcacgagttcgccgacggcagcttcagccagaagcaggtggacgagctggtgcagttccgcaaggccaacagcagcatcttcggcaagggctggcacaacttcagcgtgaagctgatgatggagctgatccccgagctgtacgagaccagcgaggagcagatgaccatcctgacccgcctgggcaagcagaagaccaccagcagcagcaacaagaccaagtacatcgacgagaagctgctgaccgaggagatctacaaccccgtggtggccaagagcgtgcgccaggccatcaagatcgtgaacgccgccatcaaggagtacggcgacttcgacaacatcgtgatcgagatggcccgcgagaccaacgaggacgacgagaagaaggccatccagaagatccagaaggccaacaaggacgagaaggacgccgccatgctgaaggccgccaaccagtacaacggcaaggccgagctgccccacagcgtgttccacggccacaagcagctggccaccaagatccgcctgtggcaccagcagggcgagcgctgcctgtacaccggcaagaccatcagcatccacgacctgatcaacaacagcaaccagttcgaggtggctgccatcctgcccctgagcatcaccttcgacgacagcctggccaacaaggtgctggtgtacgccaccgccgctcaggagaagggccagcgcaccccctaccaggccctggacagcatggacgacgcctggagcttccgcgagctgaaggccttcgtgcgcgagagcaagaccctgagcaacaagaagaaggagtacctgctgaccgaggaggacatcagcaagttcgacgtgcgcaagaagttcatcgagcgcaacctggtggacacccgctacgccagccgcgtggtgctgaacgccctgcaggagcacttccgcgcccacaagatcgacaccaaggtgagcgtggtgcgcggccagttcaccagccagctgcgccgccactggggcatcgagaagacccgcgacacctaccaccaccacgccgtggacgccctgatcattgcggcttctagccagctgaacctgtggaagaagcagaagaacaccctggtgagctacagcgaggaccagctgctggacatcgagaccggcgagctgatcagcgacgacgagtacaaggagagcgtgttcaaggccccctaccagcacttcgtggacaccctgaagagcaaggagttcgaggacagcatcctgttcagctaccaggtggacagcaagttcaaccgcaagatcagcgacgccaccatctacgccacccgccaggccaaggtgggcaaggacaaggccgacgagacctacgtgctgggcaagatcaaggacatctacacccaggacggctacgacgccttcatgaagatctacaagaaggacaagagcaagttcctgatgtaccgccacgacccccagaccttcgagaaggtgatcgagcccatcctggagaactaccccaacaagcagatcaacgataaaggcaaggaggtgccctgcaaccccttcctgaagtacaaggaggagcacggctacatccgcaagtacagcaagaagggcaacggccccgagatcaagagcctgaagtactacgacagcaagctgggcaaccacatcgacatcacccccaaggacagcaacaacaaggtggtgctgcagagcgtgagcccctggcgcgccgacgtgtacttcaacaagaccaccggcaagtacgagatcctgggcctgaagtacgccgacctgcagtttgataagggcaccggcacctacaagatcagccaggagaagtacaacgacatcaagaagaaggagggcgtggacagcgacagcgagttcaagttcaccctgtacaagaacgaccttctgctggtgaaggacaccgagaccaaggagcaacagctgttccgcttcctgagccgcaccatgcccaagcagaagcactacgtggagctgaagccctacgacaagcagaagttcgagggcggcgaggccctgatcaaggtgctgggcaacgtggccaacagcggccagtgcaagaagggcctgggcaagagcaacatcagcatctacaaggtgcgcaccgacgtgctgggcaaccagcacatcatcaagaacgagggcgacaagcccaagctggacttctaa

SEQ ID NO: 12 - DNA, 3399 bp, Streptococcus thermophilus
atgagcgacctggtgctgggcctggacatcggcatcggcagcgtgggcgtgggcatcctgaacaaggtgaccggcgagatcatccacaagaacagtcgcatcttccctgctgctcaggctgagaacaacctggtgcgccgcaccaaccgccagggtcgccggcttgctcgccgcaagaagcaccggcgcgtgcgcctgaaccgcctgttcgaggagagcggcctgatcaccgacttcaccaagatcagcatcaacctgaacccctaccagctgcgcgtgaagggcctgaccgacgagctgagcaacgaggagctgttcatcgccctgaagaacatggtgaagcaccgcggcatcagctacctggacgacgccagcgacgacggcaacagcagcgtgggcgactacgcccagatcgtgaaggagaacagcaagcagctggagaccaagacccccggccagatccagctggagcgctaccagacctacggccagctgcgcggcgacttcaccgtggagaaggacggcaagaagcaccgcctgatcaacgtgttccccaccagcgcctaccgcagcgaggccctgcgcatcctgcagacccagcaggagttcaacccccagatcaccgacgagttcatcaaccgctacctggagatcctgaccggcaagcgcaagtactaccacggccccggcaacgagaagagccgcaccgactacggccgctaccgcaccagcggcgagaccctggacaacatcttcggcatcctgatcggcaagtgcaccttctaccccgacgagttccgcgccgccaaggccagctacaccgcccaggagttcaacctgctgaacgacctgaacaacctgaccgtgcccaccgagaccaagaagctgagcaaggagcagaagaaccagatcatcaactacgtgaagaacgagaaggccatgggccccgccaagctgttcaagtacatcgccaagctgctgagctgcgacgtggccgacatcaagggctaccgcatcgacaagagcggcaaggccgagatccacaccttcgaggcctaccgcaagatgaagaccctggagaccctggacatcgagcagatggaccgcgagaccctggacaagctggcctacgtgctgaccctgaacaccgagcgcgagggcatccaggaggccctggagcacgagttcgccgacggcagcttcagccagaagcaggtggacgagctggtgcagttccgcaaggccaacagcagcatcttcggcaagggctggcacaacttcagcgtgaagctgatgatggagctgatccccgagctgtacgagaccagcgaggagcagatgaccatcctgacccgcctgggcaagcagaagaccaccagcagcagcaacaagaccaagtacatcgacgagaagctgctgaccgaggagatctacaaccccgtggtggccaagagcgtgcgccaggccatcaagatcgtgaacgccgccatcaaggagtacggcgacttcgacaacatcgtgatcgagatggcccgcgagaccaacgaggacgacgagaagaaggccatccagaagatccagaaggccaacaaggacgagaaggacgccgccatgctgaaggccgccaaccagtacaacggcaaggccgagctgccccacagcgtgttccacggccacaagcagctggccaccaagatccgcctgtggcaccagcagggcgagcgctgcctgtacaccggcaagaccatcagcatccacgacctgatcaacaacagcaaccagttcgaggtggaccacatcctgcccctgagcatcaccttcgacgacagcctggccaacaaggtgctggtgtacgccaccgccaaccaggagaagggccagcgcaccccctaccaggccctggacagcatggacgacgcctggagcttccgcgagctgaaggccttcgtgcgcgagagcaagaccctgagcaacaagaagaaggagtacctgctgaccgaggaggacatcagcaagttcgacgtgcgcaagaagttcatcgagcgcaacctggtggacacccgctacgccagccgcgtggtgctgaacgccctgcaggagcacttccgcgcccacaagatcgacaccaaggtgagcgtggtgcgcggccagttcaccagccagctgcgccgccactggggcatcgagaagacccgcgacacctaccaccaccacgccgtggacgccctgatcattgcggcttctagccagctgaacctgtggaagaagcagaagaacaccctggtgagctacagcgaggaccagctgctggacatcgagaccggcgagctgatcagcgacgacgagtacaaggagagcgtgttcaaggccccctaccagcacttcgtggacaccctgaagagcaaggagttcgaggacagcatcctgttcagctaccaggtggacagcaagttcaaccgcaagatcagcgacgccaccatctacgccacccgccaggccaaggtgggcaaggacaaggccgacgagacctacgtgctgggcaagatcaaggacatctacacccaggacggctacgacgccttcatgaagatctacaagaaggacaagagcaagttcctgatgtaccgccacgacccccagaccttcgagaaggtgatcgagcccatcctggagaactaccccaacaagcagatcaacgataaaggcaaggaggtgccctgcaaccccttcctgaagtacaaggaggagcacggctacatccgcaagtacagcaagaagggcaacggccccgagatcaagagcctgaagtactacgacagcaagctgggcaaccacatcgacatcacccccaaggacagcaacaacaaggtggtgctgcagagcgtgagcccctggcgcgccgacgtgtacttcaacaagaccaccggcaagtacgagatcctgggcctgaagtacgccgacctgcagtttgataagggcaccggcacctacaagatcagccaggagaagtacaacgacatcaagaagaaggagggcgtggacagcgacagcgagttcaagttcaccctgtacaagaacgaccttctgctggtgaaggacaccgagaccaaggagcaacagctgttccgcttcctgagccgcaccatgcccaagcagaagcactacgtggagctgaagccctacgacaagcagaagttcgagggcggcgaggccctgatcaaggtgctgggcaacgtggccaacagcggccagtgcaagaagggcctgggcaagagcaacatcagcatctacaaggtgcgcaccgacgtgctgggcaaccagcacatcatcaagaacgagggcgacaagcccaagctggacttcagcagggctgaccccaagaagaagaggaaggtgtga

SEQ ID NO: 13 - DNA, 3459 bp, Streptococcus thermophilus
atgagcgacctggtgctgggcctggacatcggcatcggcagcgtgggcgtgggcatcctgaacaaggtgaccggcgagatcatccacaagaacagtcgcatcttccctgctgctcaggctgagaacaacctggtgcgccgcaccaaccgccagggtcgccggcttgctcgccgcaagaagcaccggcgcgtgcgcctgaaccgcctgttcgaggagagcggcctgatcaccgacttcaccaagatcagcatcaacctgaacccctaccagctgcgcgtgaagggcctgaccgacgagctgagcaacgaggagctgttcatcgccctgaagaacatggtgaagcaccgcggcatcagctacctggacgacgccagcgacgacggcaacagcagcgtgggcgactacgcccagatcgtgaaggagaacagcaagcagctggagaccaagacccccggccagatccagctggagcgctaccagacctacggccagctgcgcggcgacttcaccgtggagaaggacggcaagaagcaccgcctgatcaacgtgttccccaccagcgcctaccgcagcgaggccctgcgcatcctgcagacccagcaggagttcaacccccagatcaccgacgagttcatcaaccgctacctggagatcctgaccggcaagcgcaagtactaccacggccccggcaacgagaagagccgcaccgactacggccgctaccgcaccagcggcgagaccctggacaacatcttcggcatcctgatcggcaagtgcaccttctaccccgacgagttccgcgccgccaaggccagctacaccgcccaggagttcaacctgctgaacgacctgaacaacctgaccgtgcccaccgagaccaagaagctgagcaaggagcagaagaaccagatcatcaactacgtgaagaacgagaaggccatgggccccgccaagctgttcaagtacatcgccaagctgctgagctgcgacgtggccgacatcaagggctaccgcatcgacaagagcggcaaggccgagatccacaccttcgaggcctaccgcaagatgaagaccctggagaccctggacatcgagcagatggaccgcgagaccctggacaagctggcctacgtgctgaccctgaacaccgagcgcgagggcatccaggaggccctggagcacgagttcgccgacggcagcttcagccagaagcaggtggacgagctggtgcagttccgcaaggccaacagcagcatcttcggcaagggctggcacaacttcagcgtgaagctgatgatggagctgatccccgagctgtacgagaccagcgaggagcagatgaccatcctgacccgcctgggcaagcagaagaccaccagcagcagcaacaagaccaagtacatcgacgagaagctgctgaccgaggagatctacaaccccgtggtggccaagagcgtgcgccaggccatcaagatcgtgaacgccgccatcaaggagtacggcgacttcgacaacatcgtgatcgagatggcccgcgagaccaacgaggacgacgagaagaaggccatccagaagatccagaaggccaacaaggacgagaaggacgccgccatgctgaaggccgccaaccagtacaacggcaaggccgagctgccccacagcgtgttccacggccacaagcagctggccaccaagatccgcctgtggcaccagcagggcgagcgctgcctgtacaccggcaagaccatcagcatccacgacctgatcaacaacagcaaccagttcgaggtggaccacatcctgcccctgagcatcaccttcgacgacagcctggccaacaaggtgctggtgtacgccaccgccaaccaggagaagggccagcgcaccccctaccaggccctggacagcatggacgacgcctggagcttccgcgagctgaaggccttcgtgcgcgagagcaagaccctgagcaacaagaagaaggagtacctgctgaccgaggaggacatcagcaagttcgacgtgcgcaagaagttcatcgagcgcaacctggtggacacccgctacgccagccgcgtggtgctgaacgccctgcaggagcacttccgcgcccacaagatcgacaccaaggtgagcgtggtgcgcggccagttcaccagccagctgcgccgccactggggcatcgagaagacccgcgacacctaccaccaccacgccgtggacgccctgatcattgcggcttctagccagctgaacctgtggaagaagcagaagaacaccctggtgagctacagcgaggaccagctgctggacatcgagaccggcgagctgatcagcgacgacgagtacaaggagagcgtgttcaaggccccctaccagcacttcgtggacaccctgaagagcaaggagttcgaggacagcatcctgttcagctaccaggtggacagcaagttcaaccgcaagatcagcgacgccaccatctacgccacccgccaggccaaggtgggcaaggacaaggccgacgagacctacgtgctgggcaagatcaaggacatctacacccaggacggctacgacgccttcatgaagatctacaagaaggacaagagcaagttcctgatgtaccgccacgacccccagaccttcgagaaggtgatcgagcccatcctggagaactaccccaacaagcagatcaacgataaaggcaaggaggtgccctgcaaccccttcctgaagtacaaggaggagcacggctacatccgcaagtacagcaagaagggcaacggccccgagatcaagagcctgaagtactacgacagcaagctgggcaaccacatcgacatcacccccaaggacagcaacaacaaggtggtgctgcagagcgtgagcccctggcgcgccgacgtgtacttcaacaagaccaccggcaagtacgagatcctgggcctgaagtacgccgacctgcagtttgataagggcaccggcacctacaagatcagccaggagaagtacaacgacatcaagaagaaggagggcgtggacagcgacagcgagttcaagttcaccctgtacaagaacgaccttctgctggtgaaggacaccgagaccaaggagcaacagctgttccgcttcctgagccgcaccatgcccaagcagaagcactacgtggagctgaagccctacgacaagcagaagttcgagggcggcgaggccctgatcaaggtgctgggcaacgtggccaacagcggccagtgcaagaagggcctgggcaagagcaacatcagcatctacaaggtgcgcaccgacgtgctgggcaaccagcacatcatcaagaacgagggcgacaagcccaagctggacttcgcggccgcagatccaaaaaagaagagaaaggtagatccaaaaaagaagagaaaggtagatccaaaaaagaagagaaaggtagatacggccgcatag

SEQ ID NO: 14 - DNA, 3585 bp, Streptococcus thermophilus
atgagcgacctggtgctgggcctggccatcggcatcggcagcgtgggcgtgggcatcctgaacaaggtgaccggcgagatcatccacaagaacagtcgcatcttccctgctgctcaggctgagaacaacctggtgcgccgcaccaaccgccagggtcgccggcttgctcgccgcaagaagcaccggcgcgtgcgcctgaaccgcctgttcgaggagagcggcctgatcaccgacttcaccaagatcagcatcaacctgaacccctaccagctgcgcgtgaagggcctgaccgacgagctgagcaacgaggagctgttcatcgccctgaagaacatggtgaagcaccgcggcatcagctacctggacgacgccagcgacgacggcaacagcagcgtgggcgactacgcccagatcgtgaaggagaacagcaagcagctggagaccaagacccccggccagatccagctggagcgctaccagacctacggccagctgcgcggcgacttcaccgtggagaaggacggcaagaagcaccgcctgatcaacgtgttccccaccagcgcctaccgcagcgaggccctgcgcatcctgcagacccagcaggagttcaacccccagatcaccgacgagttcatcaaccgctacctggagatcctgaccggcaagcgcaagtactaccacggccccggcaacgagaagagccgcaccgactacggccgctaccgcaccagcggcgagaccctggacaacatcttcggcatcctgatcggcaagtgcaccttctaccccgacgagttccgcgccgccaaggccagctacaccgcccaggagttcaacctgctgaacgacctgaacaacctgaccgtgcccaccgagaccaagaagctgagcaaggagcagaagaaccagatcatcaactacgtgaagaacgagaaggccatgggccccgccaagctgttcaagtacatcgccaagctgctgagctgcgacgtggccgacatcaagggctaccgcatcgacaagagcggcaaggccgagatccacaccttcgaggcctaccgcaagatgaagaccctggagaccctggacatcgagcagatggaccgcgagaccctggacaagctggcctacgtgctgaccctgaacaccgagcgcgagggcatccaggaggccctggagcacgagttcgccgacggcagcttcagccagaagcaggtggacgagctggtgcagttccgcaaggccaacagcagcatcttcggcaagggctggcacaacttcagcgtgaagctgatgatggagctgatccccgagctgtacgagaccagcgaggagcagatgaccatcctgacccgcctgggcaagcagaagaccaccagcagcagcaacaagaccaagtacatcgacgagaagctgctgaccgaggagatctacaaccccgtggtggccaagagcgtgcgccaggccatcaagatcgtgaacgccgccatcaaggagtacggcgacttcgacaacatcgtgatcgagatggcccgcgagaccaacgaggacgacgagaagaaggccatccagaagatccagaaggccaacaaggacgagaaggacgccgccatgctgaaggccgccaaccagtacaacggcaaggccgagctgccccacagcgtgttccacggccacaagcagctggccaccaagatccgcctgtggcaccagcagggcgagcgctgcctgtacaccggcaagaccatcagcatccacgacctgatcaacaacagcaaccagttcgaggtggctgccatcctgcccctgagcatcaccttcgacgacagcctggccaacaaggtgctggtgtacgccaccgccgctcaggagaagggccagcgcaccccctaccaggccctggacagcatggacgacgcctggagcttccgcgagctgaaggccttcgtgcgcgagagcaagaccctgagcaacaagaagaaggagtacctgctgaccgaggaggacatcagcaagttcgacgtgcgcaagaagttcatcgagcgcaacctggtggacacccgctacgccagccgcgtggtgctgaacgccctgcaggagcacttccgcgcccacaagatcgacaccaaggtgagcgtggtgcgcggccagttcaccagccagctgcgccgccactggggcatcgagaagacccgcgacacctaccaccaccacgccgtggacgccctgatcattgcggcttctagccagctgaacctgtggaagaagcagaagaacaccctggtgagctacagcgaggaccagctgctggacatcgagaccggcgagctgatcagcgacgacgagtacaaggagagcgtgttcaaggccccctaccagcacttcgtggacaccctgaagagcaaggagttcgaggacagcatcctgttcagctaccaggtggacagcaagttcaaccgcaagatcagcgacgccaccatctacgccacccgccaggccaaggtgggcaaggacaaggccgacgagacctacgtgctgggcaagatcaaggacatctacacccaggacggctacgacgccttcatgaagatctacaagaaggacaagagcaagttcctgatgtaccgccacgacccccagaccttcgagaaggtgatcgagcccatcctggagaactaccccaacaagcagatcaacgataaaggcaaggaggtgccctgcaaccccttcctgaagtacaaggaggagcacggctacatccgcaagtacagcaagaagggcaacggccccgagatcaagagcctgaagtactacgacagcaagctgggcaaccacatcgacatcacccccaaggacagcaacaacaaggtggtgctgcagagcgtgagcccctggcgcgccgacgtgtacttcaacaagaccaccggcaagtacgagatcctgggcctgaagtacgccgacctgcagtttgataagggcaccggcacctacaagatcagccaggagaagtacaacgacatcaagaagaaggagggcgtggacagcgacagcgagttcaagttcaccctgtacaagaacgaccttctgctggtgaaggacaccgagaccaaggagcaacagctgttccgcttcctgagccgcaccatgcccaagcagaagcactacgtggagctgaagccctacgacaagcagaagttcgagggcggcgaggccctgatcaaggtgctgggcaacgtggccaacagcggccagtgcaagaagggcctgggcaagagcaacatcagcatctacaaggtgcgcaccgacgtgctgggcaaccagcacatcatcaagaacgagggcgacaagcccaagctggacttcagcagggctgaccccaagaagaagaggaaggtggaggccagcggttccggacgggctgacgcattggacgattttgatctggatatgctgggaagtgacgccctcgatgattttgaccttgacatgcttggttcggatgcccttgatgactttgacctcgacatgctcggcagtgacgcccttgatgatttcgacctggacatgctgattaactctagatga

SEQ ID NO: 15 - DNA, 3606 bp, Streptococcus thermophilus
atgcccaagaagaagaggaaggtgagcgacctggtgctgggcctggccatcggcatcggcagcgtgggcgtgggcatcctgaacaaggtgaccggcgagatcatccacaagaacagtcgcatcttccctgctgctcaggctgagaacaacctggtgcgccgcaccaaccgccagggtcgccggcttgctcgccgcaagaagcaccggcgcgtgcgcctgaaccgcctgttcgaggagagcggcctgatcaccgacttcaccaagatcagcatcaacctgaacccctaccagctgcgcgtgaagggcctgaccgacgagctgagcaacgaggagctgttcatcgccctgaagaacatggtgaagcaccgcggcatcagctacctggacgacgccagcgacgacggcaacagcagcgtgggcgactacgcccagatcgtgaaggagaacagcaagcagctggagaccaagacccccggccagatccagctggagcgctaccagacctacggccagctgcgcggcgacttcaccgtggagaaggacggcaagaagcaccgcctgatcaacgtgttccccaccagcgcctaccgcagcgaggccctgcgcatcctgcagacccagcaggagttcaacccccagatcaccgacgagttcatcaaccgctacctggagatcctgaccggcaagcgcaagtactaccacggccccggcaacgagaagagccgcaccgactacggccgctaccgcaccagcggcgagaccctggacaacatcttcggcatcctgatcggcaagtgcaccttctaccccgacgagttccgcgccgccaaggccagctacaccgcccaggagttcaacctgctgaacgacctgaacaacctgaccgtgcccaccgagaccaagaagctgagcaaggagcagaagaaccagatcatcaactacgtgaagaacgagaaggccatgggccccgccaagctgttcaagtacatcgccaagctgctgagctgcgacgtggccgacatcaagggctaccgcatcgacaagagcggcaaggccgagatccacaccttcgaggcctaccgcaagatgaagaccctggagaccctggacatcgagcagatggaccgcgagaccctggacaagctggcctacgtgctgaccctgaacaccgagcgcgagggcatccaggaggccctggagcacgagttcgccgacggcagcttcagccagaagcaggtggacgagctggtgcagttccgcaaggccaacagcagcatcttcggcaagggctggcacaacttcagcgtgaagctgatgatggagctgatccccgagctgtacgagaccagcgaggagcagatgaccatcctgacccgcctgggcaagcagaagaccaccagcagcagcaacaagaccaagtacatcgacgagaagctgctgaccgaggagatctacaaccccgtggtggccaagagcgtgcgccaggccatcaagatcgtgaacgccgccatcaaggagtacggcgacttcgacaacatcgtgatcgagatggcccgcgagaccaacgaggacgacgagaagaaggccatccagaagatccagaaggccaacaaggacgagaaggacgccgccatgctgaaggccgccaaccagtacaacggcaaggccgagctgccccacagcgtgttccacggccacaagcagctggccaccaagatccgcctgtggcaccagcagggcgagcgctgcctgtacaccggcaagaccatcagcatccacgacctgatcaacaacagcaaccagttcgaggtggctgccatcctgcccctgagcatcaccttcgacgacagcctggccaacaaggtgctggtgtacgccaccgccgctcaggagaagggccagcgcaccccctaccaggccctggacagcatggacgacgcctggagcttccgcgagctgaaggccttcgtgcgcgagagcaagaccctgagcaacaagaagaaggagtacctgctgaccgaggaggacatcagcaagttcgacgtgcgcaagaagttcatcgagcgcaacctggtggacacccgctacgccagccgcgtggtgctgaacgccctgcaggagcacttccgcgcccacaagatcgacaccaaggtgagcgtggtgcgcggccagttcaccagccagctgcgccgccactggggcatcgagaagacccgcgacacctaccaccaccacgccgtggacgccctgatcattgcggcttctagccagctgaacctgtggaagaagcagaagaacaccctggtgagctacagcgaggaccagctgctggacatcgagaccggcgagctgatcagcgacgacgagtacaaggagagcgtgttcaaggccccctaccagcacttcgtggacaccctgaagagcaaggagttcgaggacagcatcctgttcagctaccaggtggacagcaagttcaaccgcaagatcagcgacgccaccatctacgccacccgccaggccaaggtgggcaaggacaaggccgacgagacctacgtgctgggcaagatcaaggacatctacacccaggacggctacgacgccttcatgaagatctacaagaaggacaagagcaagttcctgatgtaccgccacgacccccagaccttcgagaaggtgatcgagcccatcctggagaactaccccaacaagcagatcaacgataaaggcaaggaggtgccctgcaaccccttcctgaagtacaaggaggagcacggctacatccgcaagtacagcaagaagggcaacggccccgagatcaagagcctgaagtactacgacagcaagctgggcaaccacatcgacatcacccccaaggacagcaacaacaaggtggtgctgcagagcgtgagcccctggcgcgccgacgtgtacttcaacaagaccaccggcaagtacgagatcctgggcctgaagtacgccgacctgcagtttgataagggcaccggcacctacaagatcagccaggagaagtacaacgacatcaagaagaaggagggcgtggacagcgacagcgagttcaagttcaccctgtacaagaacgaccttctgctggtgaaggacaccgagaccaaggagcaacagctgttccgcttcctgagccgcaccatgcccaagcagaagcactacgtggagctgaagccctacgacaagcagaagttcgagggcggcgaggccctgatcaaggtgctgggcaacgtggccaacagcggccagtgcaagaagggcctgggcaagagcaacatcagcatctacaaggtgcgcaccgacgtgctgggcaaccagcacatcatcaagaacgagggcgacaagcccaagctggacttcagcagggctgaccccaagaagaagaggaaggtggaggccagcggttccggacgggctgacgcattggacgattttgatctggatatgctgggaagtgacgccctcgatgattttgaccttgacatgcttggttcggatgcccttgatgactttgacctcgacatgctcggcagtgacgcccttgatgatttcgacctggacatgctgattaactctagatga

SEQ ID NO: 16 - DNA, 3249 bp, Neisseria meningitidis
atggccgccttcaagcccaaccccatcaactacatcctgggcctggacatcggcatcgccagcgtgggctgggccatggtggagatcgacgaggacgagaaccccatctgcctgatcgacctgggtgtgcgcgtgttcgagcgcgctgaggtgcccaagactggtgacagtctggctatggctcgccggcttgctcgctctgttcggcgccttactcgccggcgcgctcaccgccttctgcgcgctcgccgcctgctgaagcgcgagggtgtgctgcaggctgccgacttcgacgagaacggcctgatcaagagcctgcccaacactccttggcagctgcgcgctgccgctctggaccgcaagctgactcctctggagtggagcgccgtgctgctgcacctgatcaagcaccgcggctacctgagccagcgcaagaacgagggcgagaccgccgacaaggagctgggtgctctgctgaagggcgtggccgacaacgcccacgccctgcagactggtgacttccgcactcctgctgagctggccctgaacaagttcgagaaggagagcggccacatccgcaaccagcgcggcgactacagccacaccttcagccgcaaggacctgcaggccgagctgatcctgctgttcgagaagcagaaggagttcggcaacccccacgtgagcggcggcctgaaggagggcatcgagaccctgctgatgacccagcgccccgccctgagcggcgacgccgtgcagaagatgctgggccactgcaccttcgagccagccgagcccaaggccgccaagaacacctacaccgccgagcgcttcatctggctgaccaagctgaacaacctgcgcatcctggagcagggcagcgagcgccccctgaccgacaccgagcgcgccaccctgatggacgagccctaccgcaagagcaagctgacctacgcccaggcccgcaagctgctgggtctggaggacaccgccttcttcaagggcctgcgctacggcaaggacaacgccgaggccagcaccctgatggagatgaaggcctaccacgccatcagccgcgccctggagaaggagggcctgaaggacaagaagagtcctctgaacctgagccccgagctgcaggacgagatcggcaccgccttcagcctgttcaagaccgacgaggacatcaccggccgcctgaaggaccgcatccagcccgagatcctggaggccctgctgaagcacatcagcttcgacaagttcgtgcagatcagcctgaaggccctgcgccgcatcgtgcccctgatggagcagggcaagcgctacgacgaggcctgcgccgagatctacggcgaccactacggcaagaagaacaccgaggagaagatctacctgcctcctatccccgccgacgagatccgcaaccccgtggtgctgcgcgccctgagccaggcccgcaaggtgatcaacggcgtggtgcgccgctacggcagccccgcccgcatccacatcgagaccgcccgcgaggtgggcaagagcttcaaggaccgcaaggagatcgagaagcgccaggaggagaaccgcaaggaccgcgagaaggccgccgccaagttccgcgagtacttccccaacttcgtgggcgagcccaagagcaaggacatcctgaagctgcgcctgtacgagcagcagcacggcaagtgcctgtacagcggcaaggagatcaacctgggccgcctgaacgagaagggctacgtggagatcgaccacgccctgcccttcagccgcacctgggacgacagcttcaacaacaaggtgctggtgctgggcagcgagaaccagaacaagggcaaccagaccccctacgagtacttcaacggcaaggacaacagccgcgagtggcaggagttcaaggcccgcgtggagaccagccgcttcccccgcagcaagaagcagcgcatcctgctgcagaagttcgacgaggacggcttcaaggagcgcaacctgaacgacacccgctacgtgaaccgcttcctgtgccagttcgtggccgaccgcatgcgcctgaccggcaagggcaagaagcgcgtgttcgccagcaacggccagatcaccaacctgctgcgcggcttctggggcctgcgcaaggtgcgcgccgagaacgaccgccaccacgccctggacgccgtggtggtggcctgcagcaccgtggccatgcagcagaagatcacccgcttcgtgcgctacaaggagatgaacgccttcgacggtaaaaccatcgacaaggagaccggcgaggtgctgcaccagaagacccacttcccccagccctgggagttcttcgcccaggaggtgatgatccgcgtgttcggcaagcccgacggcaagcccgagttcgaggaggccgacacccccgagaagctgcgcaccctgctggccgagaagctgagcagccgccctgaggccgtgcacgagtacgtgactcctctgttcgtgagccgcgcccccaaccgcaagatgagcggtcagggtcacatggagaccgtgaagagcgccaagcgcctggacgagggcgtgagcgtgctgcgcgtgcccctgacccagctgaagctgaaggacctggagaagatggtgaaccgcgagcgcgagcccaagctgtacgaggccctgaaggcccgcctggaggcccacaaggacgaccccgccaaggccttcgccgagcccttctacaagtacgacaaggccggcaaccgcacccagcaggtgaaggccgtgcgcgtggagcaggtgcagaagaccggcgtgtgggtgcgcaaccacaacggcatcgccgacaacgccaccatggtgcgcgtggacgtgttcgagaagggcgacaagtactacctggtgcccatctacagctggcaggtggccaagggcatcctgcccgaccgcgccgtggtgcagggcaaggacgaggaggactggcagctgatcgacgacagcttcaacttcaagttcagcctgcaccccaacgacctggtggaggtgatcaccaagaaggcccgcatgttcggctacttcgccagctgccaccgcggcaccggcaacatcaacatccgcatccacgacctggaccacaagatcggcaagaacggcatcctggagggcatcggcgtgaagaccgccctgagcttccagaagtaccagatcgacgagctgggcaaggagatccgcccctgccgcctgaagaagcgccctcctgtgcgctaa

SEQ ID NO: 17 - DNA, 3249 bp, Neisseria meningitidis
atggccgccttcaagcccaaccccatcaactacatcctgggcctggccatcggcatcgccagcgtgggctgggccatggtggagatcgacgaggacgagaaccccatctgcctgatcgacctgggtgtgcgcgtgttcgagcgcgctgaggtgcccaagactggtgacagtctggctatggctcgccggcttgctcgctctgttcggcgccttactcgccggcgcgctcaccgccttctgcgcgctcgccgcctgctgaagcgcgagggtgtgctgcaggctgccgacttcgacgagaacggcctgatcaagagcctgcccaacactccttggcagctgcgcgctgccgctctggaccgcaagctgactcctctggagtggagcgccgtgctgctgcacctgatcaagcaccgcggctacctgagccagcgcaagaacgagggcgagaccgccgacaaggagctgggtgctctgctgaagggcgtggccgacaacgcccacgccctgcagactggtgacttccgcactcctgctgagctggccctgaacaagttcgagaaggagagcggccacatccgcaaccagcgcggcgactacagccacaccttcagccgcaaggacctgcaggccgagctgatcctgctgttcgagaagcagaaggagttcggcaacccccacgtgagcggcggcctgaaggagggcatcgagaccctgctgatgacccagcgccccgccctgagcggcgacgccgtgcagaagatgctgggccactgcaccttcgagccagccgagcccaaggccgccaagaacacctacaccgccgagcgcttcatctggctgaccaagctgaacaacctgcgcatcctggagcagggcagcgagcgccccctgaccgacaccgagcgcgccaccctgatggacgagccctaccgcaagagcaagctgacctacgcccaggcccgcaagctgctgggtctggaggacaccgccttcttcaagggcctgcgctacggcaaggacaacgccgaggccagcaccctgatggagatgaaggcctaccacgccatcagccgcgccctggagaaggagggcctgaaggacaagaagagtcctctgaacctgagccccgagctgcaggacgagatcggcaccgccttcagcctgttcaagaccgacgaggacatcaccggccgcctgaaggaccgcatccagcccgagatcctggaggccctgctgaagcacatcagcttcgacaagttcgtgcagatcagcctgaaggccctgcgccgcatcgtgcccctgatggagcagggcaagcgctacgacgaggcctgcgccgagatctacggcgaccactacggcaagaagaacaccgaggagaagatctacctgcctcctatccccgccgacgagatccgcaaccccgtggtgctgcgcgccctgagccaggcccgcaaggtgatcaacggcgtggtgcgccgctacggcagccccgcccgcatccacatcgagaccgcccgcgaggtgggcaagagcttcaaggaccgcaaggagatcgagaagcgccaggaggagaaccgcaaggaccgcgagaaggccgccgccaagttccgcgagtacttccccaacttcgtgggcgagcccaagagcaaggacatcctgaagctgcgcctgtacgagcagcagcacggcaagtgcctgtacagcggcaaggagatcaacctgggccgcctgaacgagaagggctacgtggagatcgccgctgccctgcccttcagccgcacctgggacgacagcttcaacaacaaggtgctggtgctgggcagcgaggctcagaacaagggcaaccagaccccctacgagtacttcaacggcaaggacaacagccgcgagtggcaggagttcaaggcccgcgtggagaccagccgcttcccccgcagcaagaagcagcgcatcctgctgcagaagttcgacgaggacggcttcaaggagcgcaacctgaacgacacccgctacgtgaaccgcttcctgtgccagttcgtggccgaccgcatgcgcctgaccggcaagggcaagaagcgcgtgttcgccagcaacggccagatcaccaacctgctgcgcggcttctggggcctgcgcaaggtgcgcgccgagaacgaccgccaccacgccctggacgccgtggtggtggcctgcagcaccgtggccatgcagcagaagatcacccgcttcgtgcgctacaaggagatgaacgccttcgacggtaaaaccatcgacaaggagaccggcgaggtgctgcaccagaagacccacttcccccagccctgggagttcttcgcccaggaggtgatgatccgcgtgttcggcaagcccgacggcaagcccgagttcgaggaggccgacacccccgagaagctgcgcaccctgctggccgagaagctgagcagccgccctgaggccgtgcacgagtacgtgactcctctgttcgtgagccgcgcccccaaccgcaagatgagcggtcagggtcacatggagaccgtgaagagcgccaagcgcctggacgagggcgtgagcgtgctgcgcgtgcccctgacccagctgaagctgaaggacctggagaagatggtgaaccgcgagcgcgagcccaagctgtacgaggccctgaaggcccgcctggaggcccacaaggacgaccccgccaaggccttcgccgagcccttctacaagtacgacaaggccggcaaccgcacccagcaggtgaaggccgtgcgcgtggagcaggtgcagaagaccggcgtgtgggtgcgcaaccacaacggcatcgccgacaacgccaccatggtgcgcgtggacgtgttcgagaagggcgacaagtactacctggtgcccatctacagctggcaggtggccaagggcatcctgcccgaccgcgccgtggtgcagggcaaggacgaggaggactggcagctgatcgacgacagcttcaacttcaagttcagcctgcaccccaacgacctggtggaggtgatcaccaagaaggcccgcatgttcggctacttcgccagctgccaccgcggcaccggcaacatcaacatccgcatccacgacctggaccacaagatcggcaagaacggcatcctggagggcatcggcgtgaagaccgccctgagcttccagaagtaccagatcgacgagctgggcaaggagatccgcccctgccgcctgaagaagcgccctcctgtgcgctaa

SEQ ID NO: 18 - DNA, 3282 bp, Neisseria meningitidis
atggccgccttcaagcccaaccccatcaactacatcctgggcctggacatcggcatcgccagcgtgggctgggccatggtggagatcgacgaggacgagaaccccatctgcctgatcgacctgggtgtgcgcgtgttcgagcgcgctgaggtgcccaagactggtgacagtctggctatggctcgccggcttgctcgctctgttcggcgccttactcgccggcgcgctcaccgccttctgcgcgctcgccgcctgctgaagcgcgagggtgtgctgcaggctgccgacttcgacgagaacggcctgatcaagagcctgcccaacactccttggcagctgcgcgctgccgctctggaccgcaagctgactcctctggagtggagcgccgtgctgctgcacctgatcaagcaccgcggctacctgagccagcgcaagaacgagggcgagaccgccgacaaggagctgggtgctctgctgaagggcgtggccgacaacgcccacgccctgcagactggtgacttccgcactcctgctgagctggccctgaacaagttcgagaaggagagcggccacatccgcaaccagcgcggcgactacagccacaccttcagccgcaaggacctgcaggccgagctgatcctgctgttcgagaagcagaaggagttcggcaacccccacgtgagcggcggcctgaaggagggcatcgagaccctgctgatgacccagcgccccgccctgagcggcgacgccgtgcagaagatgctgggccactgcaccttcgagccagccgagcccaaggccgccaagaacacctacaccgccgagcgcttcatctggctgaccaagctgaacaacctgcgcatcctggagcagggcagcgagcgccccctgaccgacaccgagcgcgccaccctgatggacgagccctaccgcaagagcaagctgacctacgcccaggcccgcaagctgctgggtctggaggacaccgccttcttcaagggcctgcgctacggcaaggacaacgccgaggccagcaccctgatggagatgaaggcctaccacgccatcagccgcgccctggagaaggagggcctgaaggacaagaagagtcctctgaacctgagccccgagctgcaggacgagatcggcaccgccttcagcctgttcaagaccgacgaggacatcaccggccgcctgaaggaccgcatccagcccgagatcctggaggccctgctgaagcacatcagcttcgacaagttcgtgcagatcagcctgaaggccctgcgccgcatcgtgcccctgatggagcagggcaagcgctacgacgaggcctgcgccgagatctacggcgaccactacggcaagaagaacaccgaggagaagatctacctgcctcctatccccgccgacgagatccgcaaccccgtggtgctgcgcgccctgagccaggcccgcaaggtgatcaacggcgtggtgcgccgctacggcagccccgcccgcatccacatcgagaccgcccgcgaggtgggcaagagcttcaaggaccgcaaggagatcgagaagcgccaggaggagaaccgcaaggaccgcgagaaggccgccgccaagttccgcgagtacttccccaacttcgtgggcgagcccaagagcaaggacatcctgaagctgcgcctgtacgagcagcagcacggcaagtgcctgtacagcggcaaggagatcaacctgggccgcctgaacgagaagggctacgtggagatcgaccacgccctgcccttcagccgcacctgggacgacagcttcaacaacaaggtgctggtgctgggcagcgagaaccagaacaagggcaaccagaccccctacgagtacttcaacggcaaggacaacagccgcgagtggcaggagttcaaggcccgcgtggagaccagccgcttcccccgcagcaagaagcagcgcatcctgctgcagaagttcgacgaggacggcttcaaggagcgcaacctgaacgacacccgctacgtgaaccgcttcctgtgccagttcgtggccgaccgcatgcgcctgaccggcaagggcaagaagcgcgtgttcgccagcaacggccagatcaccaacctgctgcgcggcttctggggcctgcgcaaggtgcgcgccgagaacgaccgccaccacgccctggacgccgtggtggtggcctgcagcaccgtggccatgcagcagaagatcacccgcttcgtgcgctacaaggagatgaacgccttcgacggtaaaaccatcgacaaggagaccggcgaggtgctgcaccagaagacccacttcccccagccctgggagttcttcgcccaggaggtgatgatccgcgtgttcggcaagcccgacggcaagcccgagttcgaggaggccgacacccccgagaagctgcgcaccctgctggccgagaagctgagcagccgccctgaggccgtgcacgagtacgtgactcctctgttcgtgagccgcgcccccaaccgcaagatgagcggtcagggtcacatggagaccgtgaagagcgccaagcgcctggacgagggcgtgagcgtgctgcgcgtgcccctgacccagctgaagctgaaggacctggagaagatggtgaaccgcgagcgcgagcccaagctgtacgaggccctgaaggcccgcctggaggcccacaaggacgaccccgccaaggccttcgccgagcccttctacaagtacgacaaggccggcaaccgcacccagcaggtgaaggccgtgcgcgtggagcaggtgcagaagaccggcgtgtgggtgcgcaaccacaacggcatcgccgacaacgccaccatggtgcgcgtggacgtgttcgagaagggcgacaagtactacctggtgcccatctacagctggcaggtggccaagggcatcctgcccgaccgcgccgtggtgcagggcaaggacgaggaggactggcagctgatcgacgacagcttcaacttcaagttcagcctgcaccccaacgacctggtggaggtgatcaccaagaaggcccgcatgttcggctacttcgccagctgccaccgcggcaccggcaacatcaacatccgcatccacgacctggaccacaagatcggcaagaacggcatcctggagggcatcggcgtgaagaccgccctgagcttccagaagtaccagatcgacgagctgggcaaggagatccgcccctgccgcctgaagaagcgccctcctgtgcgcagcagggctgaccccaagaagaagaggaaggtgtga

SEQ ID NO: 19 - DNA, 3342 bp, Neisseria meningitidis
atggccgccttcaagcccaaccccatcaactacatcctgggcctggacatcggcatcgccagcgtgggctgggccatggtggagatcgacgaggacgagaaccccatctgcctgatcgacctgggtgtgcgcgtgttcgagcgcgctgaggtgcccaagactggtgacagtctggctatggctcgccggcttgctcgctctgttcggcgccttactcgccggcgcgctcaccgccttctgcgcgctcgccgcctgctgaagcgcgagggtgtgctgcaggctgccgacttcgacgagaacggcctgatcaagagcctgcccaacactccttggcagctgcgcgctgccgctctggaccgcaagctgactcctctggagtggagcgccgtgctgctgcacctgatcaagcaccgcggctacctgagccagcgcaagaacgagggcgagaccgccgacaaggagctgggtgctctgctgaagggcgtggccgacaacgcccacgccctgcagactggtgacttccgcactcctgctgagctggccctgaacaagttcgagaaggagagcggccacatccgcaaccagcgcggcgactacagccacaccttcagccgcaaggacctgcaggccgagctgatcctgctgttcgagaagcagaaggagttcggcaacccccacgtgagcggcggcctgaaggagggcatcgagaccctgctgatgacccagcgccccgccctgagcggcgacgccgtgcagaagatgctgggccactgcaccttcgagccagccgagcccaaggccgccaagaacacctacaccgccgagcgcttcatctggctgaccaagctgaacaacctgcgcatcctggagcagggcagcgagcgccccctgaccgacaccgagcgcgccaccctgatggacgagccctaccgcaagagcaagctgacctacgcccaggcccgcaagctgctgggtctggaggacaccgccttcttcaagggcctgcgctacggcaaggacaacgccgaggccagcaccctgatggagatgaaggcctaccacgccatcagccgcgccctggagaaggagggcctgaaggacaagaagagtcctctgaacctgagccccgagctgcaggacgagatcggcaccgccttcagcctgttcaagaccgacgaggacatcaccggccgcctgaaggaccgcatccagcccgagatcctggaggccctgctgaagcacatcagcttcgacaagttcgtgcagatcagcctgaaggccctgcgccgcatcgtgcccctgatggagcagggcaagcgctacgacgaggcctgcgccgagatctacggcgaccactacggcaagaagaacaccgaggagaagatctacctgcctcctatccccgccgacgagatccgcaaccccgtggtgctgcgcgccctgagccaggcccgcaaggtgatcaacggcgtggtgcgccgctacggcagccccgcccgcatccacatcgagaccgcccgcgaggtgggcaagagcttcaaggaccgcaaggagatcgagaagcgccaggaggagaaccgcaaggaccgcgagaaggccgccgccaagttccgcgagtacttccccaacttcgtgggcgagcccaagagcaaggacatcctgaagctgcgcctgtacgagcagcagcacggcaagtgcctgtacagcggcaaggagatcaacctgggccgcctgaacgagaagggctacgtggagatcgaccacgccctgcccttcagccgcacctgggacgacagcttcaacaacaaggtgctggtgctgggcagcgagaaccagaacaagggcaaccagaccccctacgagtacttcaacggcaaggacaacagccgcgagtggcaggagttcaaggcccgcgtggagaccagccgcttcccccgcagcaagaagcagcgcatcctgctgcagaagttcgacgaggacggcttcaaggagcgcaacctgaacgacacccgctacgtgaaccgcttcctgtgccagttcgtggccgaccgcatgcgcctgaccggcaagggcaagaagcgcgtgttcgccagcaacggccagatcaccaacctgctgcgcggcttctggggcctgcgcaaggtgcgcgccgagaacgaccgccaccacgccctggacgccgtggtggtggcctgcagcaccgtggccatgcagcagaagatcacccgcttcgtgcgctacaaggagatgaacgccttcgacggtaaaaccatcgacaaggagaccggcgaggtgctgcaccagaagacccacttcccccagccctgggagttcttcgcccaggaggtgatgatccgcgtgttcggcaagcccgacggcaagcccgagttcgaggaggccgacacccccgagaagctgcgcaccctgctggccgagaagctgagcagccgccctgaggccgtgcacgagtacgtgactcctctgttcgtgagccgcgcccccaaccgcaagatgagcggtcagggtcacatggagaccgtgaagagcgccaagcgcctggacgagggcgtgagcgtgctgcgcgtgcccctgacccagctgaagctgaaggacctggagaagatggtgaaccgcgagcgcgagcccaagctgtacgaggccctgaaggcccgcctggaggcccacaaggacgaccccgccaaggccttcgccgagcccttctacaagtacgacaaggccggcaaccgcacccagcaggtgaaggccgtgcgcgtggagcaggtgcagaagaccggcgtgtgggtgcgcaaccacaacggcatcgccgacaacgccaccatggtgcgcgtggacgtgttcgagaagggcgacaagtactacctggtgcccatctacagctggcaggtggccaagggcatcctgcccgaccgcgccgtggtgcagggcaaggacgaggaggactggcagctgatcgacgacagcttcaacttcaagttcagcctgcaccccaacgacctggtggaggtgatcaccaagaaggcccgcatgttcggctacttcgccagctgccaccgcggcaccggcaacatcaacatccgcatccacgacctggaccacaagatcggcaagaacggcatcctggagggcatcggcgtgaagaccgccctgagcttccagaagtaccagatcgacgagctgggcaaggagatccgcccctgccgcctgaagaagcgccctcctgtgcgcgcggccgcagatccaaaaaagaagagaaaggtagatccaaaaaagaagagaaaggtagatccaaaaaagaagagaaaggtagatacggccgcatag

SEQ ID NO: 20 - DNA, 3468 bp, Neisseria meningitidis
atggccgccttcaagcccaaccccatcaactacatcctgggcctggccatcggcatcgccagcgtgggctgggccatggtggagatcgacgaggacgagaaccccatctgcctgatcgacctgggtgtgcgcgtgttcgagcgcgctgaggtgcccaagactggtgacagtctggctatggctcgccggcttgctcgctctgttcggcgccttactcgccggcgcgctcaccgccttctgcgcgctcgccgcctgctgaagcgcgagggtgtgctgcaggctgccgacttcgacgagaacggcctgatcaagagcctgcccaacactccttggcagctgcgcgctgccgctctggaccgcaagctgactcctctggagtggagcgccgtgctgctgcacctgatcaagcaccgcggctacctgagccagcgcaagaacgagggcgagaccgccgacaaggagctgggtgctctgctgaagggcgtggccgacaacgcccacgccctgcagactggtgacttccgcactcctgctgagctggccctgaacaagttcgagaaggagagcggccacatccgcaaccagcgcggcgactacagccacaccttcagccgcaaggacctgcaggccgagctgatcctgctgttcgagaagcagaaggagttcggcaacccccacgtgagcggcggcctgaaggagggcatcgagaccctgctgatgacccagcgccccgccctgagcggcgacgccgtgcagaagatgctgggccactgcaccttcgagccagccgagcccaaggccgccaagaacacctacaccgccgagcgcttcatctggctgaccaagctgaacaacctgcgcatcctggagcagggcagcgagcgccccctgaccgacaccgagcgcgccaccctgatggacgagccctaccgcaagagcaagctgacctacgcccaggcccgcaagctgctgggtctggaggacaccgccttcttcaagggcctgcgctacggcaaggacaacgccgaggccagcaccctgatggagatgaaggcctaccacgccatcagccgcgccctggagaaggagggcctgaaggacaagaagagtcctctgaacctgagccccgagctgcaggacgagatcggcaccgccttcagcctgttcaagaccgacgaggacatcaccggccgcctgaaggaccgcatccagcccgagatcctggaggccctgctgaagcacatcagcttcgacaagttcgtgcagatcagcctgaaggccctgcgccgcatcgtgcccctgatggagcagggcaagcgctacgacgaggcctgcgccgagatctacggcgaccactacggcaagaagaacaccgaggagaagatctacctgcctcctatccccgccgacgagatccgcaaccccgtggtgctgcgcgccctgagccaggcccgcaaggtgatcaacggcgtggtgcgccgctacggcagccccgcccgcatccacatcgagaccgcccgcgaggtgggcaagagcttcaaggaccgcaaggagatcgagaagcgccaggaggagaaccgcaaggaccgcgagaaggccgccgccaagttccgcgagtacttccccaacttcgtgggcgagcccaagagcaaggacatcctgaagctgcgcctgtacgagcagcagcacggcaagtgcctgtacagcggcaaggagatcaacctgggccgcctgaacgagaagggctacgtggagatcgccgctgccctgcccttcagccgcacctgggacgacagcttcaacaacaaggtgctggtgctgggcagcgaggctcagaacaagggcaaccagaccccctacgagtacttcaacggcaaggacaacagccgcgagtggcaggagttcaaggcccgcgtggagaccagccgcttcccccgcagcaagaagcagcgcatcctgctgcagaagttcgacgaggacggcttcaaggagcgcaacctgaacgacacccgctacgtgaaccgcttcctgtgccagttcgtggccgaccgcatgcgcctgaccggcaagggcaagaagcgcgtgttcgccagcaacggccagatcaccaacctgctgcgcggcttctggggcctgcgcaaggtgcgcgccgagaacgaccgccaccacgccctggacgccgtggtggtggcctgcagcaccgtggccatgcagcagaagatcacccgcttcgtgcgctacaaggagatgaacgccttcgacggtaaaaccatcgacaaggagaccggcgaggtgctgcaccagaagacccacttcccccagccctgggagttcttcgcccaggaggtgatgatccgcgtgttcggcaagcccgacggcaagcccgagttcgaggaggccgacacccccgagaagctgcgcaccctgctggccgagaagctgagcagccgccctgaggccgtgcacgagtacgtgactcctctgttcgtgagccgcgcccccaaccgcaagatgagcggtcagggtcacatggagaccgtgaagagcgccaagcgcctggacgagggcgtgagcgtgctgcgcgtgcccctgacccagctgaagctgaaggacctggagaagatggtgaaccgcgagcgcgagcccaagctgtacgaggccctgaaggcccgcctggaggcccacaaggacgaccccgccaaggccttcgccgagcccttctacaagtacgacaaggccggcaaccgcacccagcaggtgaaggccgtgcgcgtggagcaggtgcagaagaccggcgtgtgggtgcgcaaccacaacggcatcgccgacaacgccaccatggtgcgcgtggacgtgttcgagaagggcgacaagtactacctggtgcccatctacagctggcaggtggccaagggcatcctgcccgaccgcgccgtggtgcagggcaaggacgaggaggactggcagctgatcgacgacagcttcaacttcaagttcagcctgcaccccaacgacctggtggaggtgatcaccaagaaggcccgcatgttcggctacttcgccagctgccaccgcggcaccggcaacatcaacatccgcatccacgacctggaccacaagatcggcaagaacggcatcctggagggcatcggcgtgaagaccgccctgagcttccagaagtaccagatcgacgagctgggcaaggagatccgcccctgccgcctgaagaagcgccctcctgtgcgcagcagggctgaccccaagaagaagaggaaggtggaggccagcggttccggacgggctgacgcattggacgattttgatctggatatgctgggaagtgacgccctcgatgattttgaccttgacatgcttggttcggatgcccttgatgactttgacctcgacatgctcggcagtgacgcccttgatgatttcgacctggacatgctgattaactctagatga

SEQ ID NO: 21 - DNA, 3489 bp, Neisseria meningitidis
atgcccaagaagaagaggaaggtggccgccttcaagcccaaccccatcaactacatcctgggcctggccatcggcatcgccagcgtgggctgggccatggtggagatcgacgaggacgagaaccccatctgcctgatcgacctgggtgtgcgcgtgttcgagcgcgctgaggtgcccaagactggtgacagtctggctatggctcgccggcttgctcgctctgttcggcgccttactcgccggcgcgctcaccgccttctgcgcgctcgccgcctgctgaagcgcgagggtgtgctgcaggctgccgacttcgacgagaacggcctgatcaagagcctgcccaacactccttggcagctgcgcgctgccgctctggaccgcaagctgactcctctggagtggagcgccgtgctgctgcacctgatcaagcaccgcggctacctgagccagcgcaagaacgagggcgagaccgccgacaaggagctgggtgctctgctgaagggcgtggccgacaacgcccacgccctgcagactggtgacttccgcactcctgctgagctggccctgaacaagttcgagaaggagagcggccacatccgcaaccagcgcggcgactacagccacaccttcagccgcaaggacctgcaggccgagctgatcctgctgttcgagaagcagaaggagttcggcaacccccacgtgagcggcggcctgaaggagggcatcgagaccctgctgatgacccagcgccccgccctgagcggcgacgccgtgcagaagatgctgggccactgcaccttcgagccagccgagcccaaggccgccaagaacacctacaccgccgagcgcttcatctggctgaccaagctgaacaacctgcgcatcctggagcagggcagcgagcgccccctgaccgacaccgagcgcgccaccctgatggacgagccctaccgcaagagcaagctgacctacgcccaggcccgcaagctgctgggtctggaggacaccgccttcttcaagggcctgcgctacggcaaggacaacgccgaggccagcaccctgatggagatgaaggcctaccacgccatcagccgcgccctggagaaggagggcctgaaggacaagaagagtcctctgaacctgagccccgagctgcaggacgagatcggcaccgccttcagcctgttcaagaccgacgaggacatcaccggccgcctgaaggaccgcatccagcccgagatcctggaggccctgctgaagcacatcagcttcgacaagttcgtgcagatcagcctgaaggccctgcgccgcatcgtgcccctgatggagcagggcaagcgctacgacgaggcctgcgccgagatctacggcgaccactacggcaagaagaacaccgaggagaagatctacctgcctcctatccccgccgacgagatccgcaaccccgtggtgctgcgcgccctgagccaggcccgcaaggtgatcaacggcgtggtgcgccgctacggcagccccgcccgcatccacatcgagaccgcccgcgaggtgggcaagagcttcaaggaccgcaaggagatcgagaagcgccaggaggagaaccgcaaggaccgcgagaaggccgccgccaagttccgcgagtacttccccaacttcgtgggcgagcccaagagcaaggacatcctgaagctgcgcctgtacgagcagcagcacggcaagtgcctgtacagcggcaaggagatcaacctgggccgcctgaacgagaagggctacgtggagatcgccgctgccctgcccttcagccgcacctgggacgacagcttcaacaacaaggtgctggtgctgggcagcgaggctcagaacaagggcaaccagaccccctacgagtacttcaacggcaaggacaacagccgcgagtggcaggagttcaaggcccgcgtggagaccagccgcttcccccgcagcaagaagcagcgcatcctgctgcagaagttcgacgaggacggcttcaaggagcgcaacctgaacgacacccgctacgtgaaccgcttcctgtgccagttcgtggccgaccgcatgcgcctgaccggcaagggcaagaagcgcgtgttcgccagcaacggccagatcaccaacctgctgcgcggcttctggggcctgcgcaaggtgcgcgccgagaacgaccgccaccacgccctggacgccgtggtggtggcctgcagcaccgtggccatgcagcagaagatcacccgcttcgtgcgctacaaggagatgaacgccttcgacggtaaaaccatcgacaaggagaccggcgaggtgctgcaccagaagacccacttcccccagccctgggagttcttcgcccaggaggtgatgatccgcgtgttcggcaagcccgacggcaagcccgagttcgaggaggccgacacccccgagaagctgcgcaccctgctggccgagaagctgagcagccgccctgaggccgtgcacgagtacgtgactcctctgttcgtgagccgcgcccccaaccgcaagatgagcggtcagggtcacatggagaccgtgaagagcgccaagcgcctggacgagggcgtgagcgtgctgcgcgtgcccctgacccagctgaagctgaaggacctggagaagatggtgaaccgcgagcgcgagcccaagctgtacgaggccctgaaggcccgcctggaggcccacaaggacgaccccgccaaggccttcgccgagcccttctacaagtacgacaaggccggcaaccgcacccagcaggtgaaggccgtgcgcgtggagcaggtgcagaagaccggcgtgtgggtgcgcaaccacaacggcatcgccgacaacgccaccatggtgcgcgtggacgtgttcgagaagggcgacaagtactacctggtgcccatctacagctggcaggtggccaagggcatcctgcccgaccgcgccgtggtgcagggcaaggacgaggaggactggcagctgatcgacgacagcttcaacttcaagttcagcctgcaccccaacgacctggtggaggtgatcaccaagaaggcccgcatgttcggctacttcgccagctgccaccgcggcaccggcaacatcaacatccgcatccacgacctggaccacaagatcggcaagaacggcatcctggagggcatcggcgtgaagaccgccctgagcttccagaagtaccagatcgacgagctgggcaaggagatccgcccctgccgcctgaagaagcgccctcctgtgcgcagcagggctgaccccaagaagaagaggaaggtggaggccagcggttccggacgggctgacgcattggacgattttgatctggatatgctgggaagtgacgccctcgatgattttgaccttgacatgcttggttcggatgcccttgatgactttgacctcgacatgctcggcagtgacgcccttgatgatttcgacctggacatgctgattaactctagatga

SEQ ID NO: 22 - DNA, 4188 bp, Treponema denticola
atgaagaaggagatcaaggactacttcctgggcctggacgtgggcaccggcagcgtgggctgggccgtgaccgacaccgactacaagctgctgaaggccaaccgcaaggacctgtggggcatgcgctgcttcgagactgctgagaccgccgaggtgcgccggctgcaccgcggtgctcgccggcgcatcgagcgccgcaagaagcgcatcaagctgctgcaggagctgttcagccaggagatcgccaagaccgacgagggcttcttccagcgcatgaaggagagccccttctacgccgaggacaagaccatcctgcaggagaacaccctgttcaacgacaaggacttcgccgacaagacctaccacaaggcctaccccaccatcaaccacctgatcaaggcctggatcgagaacaaggtgaagcccgaccctcgcctgctgtacctggcctgccacaacatcatcaagaagcgcggccacttcctgttcgagggcgacttcgacagcgagaaccagttcgacaccagcatccaggccctgttcgagtacctgcgcgaggacatggaggtggacatcgacgccgacagccagaaggtgaaggagatcctgaaggacagcagcctgaagaacagcgagaagcagagccgcctgaacaagatcctgggcctgaagcccagcgacaagcagaagaaggccatcaccaacctgatcagcggcaacaagatcaacttcgccgacctgtacgacaaccccgacctgaaggacgccgagaagaacagcatcagcttcagcaaggacgacttcgacgccctgagcgacgacctggccagcatcctgggcgacagcttcgagctgctgctgaaggccaaggccgtgtacaactgcagcgtgctgagcaaggtgatcggcgacgagcagtacctgagcttcgccaaggtgaagatctacgagaagcacaagaccgaccttaccaagctgaagaacgtgatcaagaagcacttccccaaggactacaagaaggtgttcggctacaacaagaacgagaagaacaacaacaactacagcggctacgtgggcgtgtgcaagaccaagagcaagaagctgatcatcaacaacagcgtgaaccaggaggacttctacaagttcctgaagaccatcctgagcgccaagagcgagatcaaggaggtgaacgacatcctgaccgagatcgagaccggcaccttcctgcccaagcagatcagcaagagcaacgccgagatcccctaccagctgcgcaagatggagctggagaagatcctgagcaacgccgagaagcacttcagcttcctgaagcagaaggacgagaagggcctgagccacagcgagaagatcatcatgctgctgaccttcaagatcccctactacatcggccccatcaacgacaaccacaagaagttcttccccgaccgctgctgggtggtgaagaaggagaagagccccagcggcaagaccaccccctggaacttcttcgaccacatcgacaaggagaagaccgccgaggccttcatcaccagccgcaccaacttctgcacatacctggtgggcgagagcgtgctgcccaagagcagcctgctgtacagcgagtacaccgtgctgaacgagatcaacaacctgcagatcatcatcgacggcaagaacatctgcgacatcaagctgaagcagaagatctacgaggacctgttcaagaagtacaagaagatcacccagaagcagatcagcaccttcatcaagcacgagggcatctgcaacaagaccgacgaggtgatcatcctgggcatcgacaaggagtgcaccagcagcctgaagagctacatcgagctgaagaacatcttcggcaagcaggtggacgagatcagcaccaagaacatgctggaggagatcatccgctgggccaccatctacgacgagggcgagggcaagaccatcctgaagaccaagatcaaggccgagtacggcaagtactgcagcgacgagcagatcaagaagatcctgaacctgaagttcagcggctggggccgcctgagccgcaagttcctggagaccgtgaccagcgagatgcccggcttcagcgagcccgtgaacatcatcaccgccatgcgcgagacccagaacaacctgatggagctgctgagcagcgagttcaccttcaccgagaacatcaagaagatcaacagcggcttcgaggacgccgagaagcagttcagctacgacggcctggtgaagcccctgttcctgagccccagcgtgaagaagatgctgtggcagaccctgaagctggtgaaggagatcagccacatcacccaggctcctcctaagaagatcttcatcgagatggccaagggcgccgagctggagcctgctcgcaccaagacccgcctgaagatcctgcaggacctgtacaacaactgcaagaacgacgccgacgcattcagcagcgagatcaaggacctgagcggcaagatcgagaacgaggacaacctgcgcctgcgcagcgacaagctgtacctgtactacacccagctgggcaagtgcatgtactgcggcaagcccatcgagatcggccacgtgttcgacaccagcaactacgacatcgaccacatctacccccagagcaagatcaaggacgacagcatcagcaaccgcgtgctggtgtgcagcagctgcaacaagaacaaggaggacaagtaccctctgaagagcgagatccagagcaagcagcgcggcttctggaacttcctgcagcgcaacaacttcatcagcctggagaagctgaaccgcctgacccgcgccacccccatcagcgacgacgagaccgccaagttcatcgcccgccagctggtggagactcgccaagctaccaaggtggccgccaaggtgctggagaagatgttccccgagaccaagatcgtgtacagcaaggccgagaccgtgagcatgttccgcaacaagttcgacatcgtgaagtgccgcgagatcaacgacttccaccacgcccacgacgcctacctgaacatcgtggtgggcaacgtgtacaacaccaagttcaccaacaacccctggaatttcattaaggagaagcgcgacaaccccaagatcgccgacacctacaactactacaaggtgttcgactacgacgtgaagcgcaacaacatcaccgcctgggagaagggcaagaccatcatcaccgtgaaggacatgctgaagcgcaacacccccatctacacccgccaggccgcctgcaagaagggcgagctgttcaaccagaccatcatgaagaagggcctgggccagcaccccctgaagaaggagggccccttcagcaacatcagcaagtacggcggctacaacaaggtgagcgccgcctactacaccctgatcgagtacgaggagaagggcaacaagatccgcagcctggagaccatccccctgtacctggtgaaggacatccagaaggaccaggacgtgctgaagagctacctgaccgacctgctgggcaagaaggagttcaagatcctggtgcccaagatcaagatcaacagcctgctgaagatcaacggcttcccctgccacatcaccggcaagaccaacgacagcttcctgctgcgccccgccgtgcagttctgctgcagcaacaacgaggtgctgtacttcaagaagatcatccgcttcagcgagatccgcagccagcgcgagaagatcggcaagaccatcagcccctacgaggacctgagcttccgcagctacatcaaggagaacctgtggaagaagaccaagaacgacgagatcggcgagaaggagttctacgacctgctgcagaagaagaacctggagatctacgacatgctgctgaccaagcacaaggacaccatctacaagaagcgccccaacagcgccaccatcgacatcctggtgaagggcaaggagaagttcaagagcctgatcatcgagaaccagttcgaggtgatcctggagatcctgaagctgttcagcgccacccgcaacgtgagcgacctgcagcacatcggcggcagcaagtacagcggcgtggccaagatcggcaacaagatcagcagcctggacaactgcatcctgatctaccagagcatcaccggcatcttcgagaagcgcatcgacctgctgaaggtgtaa

SEQ ID NO: 23 - DNA, 4188 bp, Treponema denticola
atgaagaaggagatcaaggactacttcctgggcctggccgtgggcaccggcagcgtgggctgggccgtgaccgacaccgactacaagctgctgaaggccaaccgcaaggacctgtggggcatgcgctgcttcgagactgctgagaccgccgaggtgcgccggctgcaccgcggtgctcgccggcgcatcgagcgccgcaagaagcgcatcaagctgctgcaggagctgttcagccaggagatcgccaagaccgacgagggcttcttccagcgcatgaaggagagccccttctacgccgaggacaagaccatcctgcaggagaacaccctgttcaacgacaaggacttcgccgacaagacctaccacaaggcctaccccaccatcaaccacctgatcaaggcctggatcgagaacaaggtgaagcccgaccctcgcctgctgtacctggcctgccacaacatcatcaagaagcgcggccacttcctgttcgagggcgacttcgacagcgagaaccagttcgacaccagcatccaggccctgttcgagtacctgcgcgaggacatggaggtggacatcgacgccgacagccagaaggtgaaggagatcctgaaggacagcagcctgaagaacagcgagaagcagagccgcctgaacaagatcctgggcctgaagcccagcgacaagcagaagaaggccatcaccaacctgatcagcggcaacaagatcaacttcgccgacctgtacgacaaccccgacctgaaggacgccgagaagaacagcatcagcttcagcaaggacgacttcgacgccctgagcgacgacctggccagcatcctgggcgacagcttcgagctgctgctgaaggccaaggccgtgtacaactgcagcgtgctgagcaaggtgatcggcgacgagcagtacctgagcttcgccaaggtgaagatctacgagaagcacaagaccgaccttaccaagctgaagaacgtgatcaagaagcacttccccaaggactacaagaaggtgttcggctacaacaagaacgagaagaacaacaacaactacagcggctacgtgggcgtgtgcaagaccaagagcaagaagctgatcatcaacaacagcgtgaaccaggaggacttctacaagttcctgaagaccatcctgagcgccaagagcgagatcaaggaggtgaacgacatcctgaccgagatcgagaccggcaccttcctgcccaagcagatcagcaagagcaacgccgagatcccctaccagctgcgcaagatggagctggagaagatcctgagcaacgccgagaagcacttcagcttcctgaagcagaaggacgagaagggcctgagccacagcgagaagatcatcatgctgctgaccttcaagatcccctactacatcggccccatcaacgacaaccacaagaagttcttccccgaccgctgctgggtggtgaagaaggagaagagccccagcggcaagaccaccccctggaacttcttcgaccacatcgacaaggagaagaccgccgaggccttcatcaccagccgcaccaacttctgcacatacctggtgggcgagagcgtgctgcccaagagcagcctgctgtacagcgagtacaccgtgctgaacgagatcaacaacctgcagatcatcatcgacggcaagaacatctgcgacatcaagctgaagcagaagatctacgaggacctgttcaagaagtacaagaagatcacccagaagcagatcagcaccttcatcaagcacgagggcatctgcaacaagaccgacgaggtgatcatcctgggcatcgacaaggagtgcaccagcagcctgaagagctacatcgagctgaagaacatcttcggcaagcaggtggacgagatcagcaccaagaacatgctggaggagatcatccgctgggccaccatctacgacgagggcgagggcaagaccatcctgaagaccaagatcaaggccgagtacggcaagtactgcagcgacgagcagatcaagaagatcctgaacctgaagttcagcggctggggccgcctgagccgcaagttcctggagaccgtgaccagcgagatgcccggcttcagcgagcccgtgaacatcatcaccgccatgcgcgagacccagaacaacctgatggagctgctgagcagcgagttcaccttcaccgagaacatcaagaagatcaacagcggcttcgaggacgccgagaagcagttcagctacgacggcctggtgaagcccctgttcctgagccccagcgtgaagaagatgctgtggcagaccctgaagctggtgaaggagatcagccacatcacccaggctcctcctaagaagatcttcatcgagatggccaagggcgccgagctggagcctgctcgcaccaagacccgcctgaagatcctgcaggacctgtacaacaactgcaagaacgacgccgacgcattcagcagcgagatcaaggacctgagcggcaagatcgagaacgaggacaacctgcgcctgcgcagcgacaagctgtacctgtactacacccagctgggcaagtgcatgtactgcggcaagcccatcgagatcggccacgtgttcgacaccagcaactacgacatcgctgctatctacccccagagcaagatcaaggacgacagcatcagcaaccgcgtgctggtgtgcagcagctgcgccaagaacaaggaggacaagtaccctctgaagagcgagatccagagcaagcagcgcggcttctggaacttcctgcagcgcaacaacttcatcagcctggagaagctgaaccgcctgacccgcgccacccccatcagcgacgacgagaccgccaagttcatcgcccgccagctggtggagactcgccaagctaccaaggtggccgccaaggtgctggagaagatgttccccgagaccaagatcgtgtacagcaaggccgagaccgtgagcatgttccgcaacaagttcgacatcgtgaagtgccgcgagatcaacgacttccaccacgcccacgacgcctacctgaacatcgtggtgggcaacgtgtacaacaccaagttcaccaacaacccctggaatttcattaaggagaagcgcgacaaccccaagatcgccgacacctacaactactacaaggtgttcgactacgacgtgaagcgcaacaacatcaccgcctgggagaagggcaagaccatcatcaccgtgaaggacatgctgaagcgcaacacccccatctacacccgccaggccgcctgcaagaagggcgagctgttcaaccagaccatcatgaagaagggcctgggccagcaccccctgaagaaggagggccccttcagcaacatcagcaagtacggcggctacaacaaggtgagcgccgcctactacaccctgatcgagtacgaggagaagggcaacaagatccgcagcctggagaccatccccctgtacctggtgaaggacatccagaaggaccaggacgtgctgaagagctacctgaccgacctgctgggcaagaaggagttcaagatcctggtgcccaagatcaagatcaacagcctgctgaagatcaacggcttcccctgccacatcaccggcaagaccaacgacagcttcctgctgcgccccgccgtgcagttctgctgcagcaacaacgaggtgctgtacttcaagaagatcatccgcttcagcgagatccgcagccagcgcgagaagatcggcaagaccatcagcccctacgaggacctgagcttccgcagctacatcaaggagaacctgtggaagaagaccaagaacgacgagatcggcgagaaggagttctacgacctgctgcagaagaagaacctggagatctacgacatgctgctgaccaagcacaaggacaccatctacaagaagcgccccaacagcgccaccatcgacatcctggtgaagggcaaggagaagttcaagagcctgatcatcgagaaccagttcgaggtgatcctggagatcctgaagctgttcagcgccacccgcaacgtgagcgacctgcagcacatcggcggcagcaagtacagcggcgtggccaagatcggcaacaagatcagcagcctggacaactgcatcctgatctaccagagcatcaccggcatcttcgagaagcgcatcgacctgctgaaggtgtaa

SEQ ID NO: 24 - protein, 1053 aa, Streptococcus aureas
MKRNYILGLDIGITSVGYGIIDYETRDVIDAGVRLFKEANVENNEGRRSKRGARRLKRRRRHRIQRVKKLLFDYNLLTDHSELSGINPYEARVKGLSQKLSEEEFSAALLHLAKRRGVHNVNEVEEDTGNELSTKEQISRNSKALEEKYVAELQLERLKKDGEVRGSINRFKTSDYVKEAKQLLKVQKAYHQLDQSFIDTYIDLLETRRTYYEGPGEGSPFGWKDIKEWYEMLMGHCTYFPEELRSVKYAYNADLYNALNDLNNLVITRDENEKLEYYEKFQIIENVFKQKKKPTLKQIAKEILVNEEDIKGYRVTSTGKPEFTNLKVYHDIKDITARKEIIENAELLDQIAKILTIYQSSEDIQEELTNLNSELTQEEIEQISNLKGYTGTHNLSLKAINLILDELWHTNDNQIAIFNRLKLVPKKVDLSQQKEIPTTLVDDFILSPVVKRSFIQSIKVINAIIKKYGLPNDIIIELAREKNSKDAQKMINEMQKRNRQTNERIEEIIRTTGKENAKYLIEKIKLHDMQEGKCLYSLEAIPLEDLLNNPFNYEVDHIIPRSVSFDNSFNNKVLVKQEENSKKGNRTPFQYLSSSDSKISYETFKKHILNLAKGKGRISKTKKEYLLEERDINRFSVQKDFINRNLVDTRYATRGLMNLLRSYFRVNNLDVKVKSINGGFTSFLRRKWKFKKERNKGYKHHAEDALIIANADFIFKEWKKLDKAKKVMENQMFEEKQAESMPEIETEQEYKEIFITPHQIKHIKDFKDYKYSHRVDKKPNRELINDTLYSTRKDDKGNTLIVNNLNGLYDKDNDKLKKLINKSPEKLLMYHHDPQTYQKLKLIMEQYGDEKNPLYKYYEETGNYLTKYSKKDNGPVIKKIKYYGNKLNAHLDITDDYPNSRNKVVKLSLKPYRFDVYLDNGVYKFVTVKNLDVIKKENYYEVNSKCYEEAKKLKKISNQAEFIASFYNNDLIKINGELYRVIGVNNDLLNRIEVNMIDITYREYLENMNDKRPPRIIKTIASKTQSIKKYSTDILGNLYEVKSKKHPQIIKKG

SEQ ID NO: 25 - DNA, 3162 bp, Streptococcus aureas
atgaaaaggaattatatcttaggattagatatcggaattacatcagtgggttatggaattattgattatgaaactagagatgtcatagatgcgggcgtacgtttatttaaagaggctaatgttgaaaataatgaaggacgacgatcaaaaagaggtgccagaaggcttaagaggcgtcgtagacatagaatacaaagagtaaagaaacttttatttgattacaatttgttgacagatcatagtgagctaagtggaatcaatccttacgaggcgcgcgtaaagggattaagtcaaaaattaagtgaagaggaattttctgcggcattgctacatttagcaaagcgtagaggtgtacataatgttaatgaagtggaagaagatacaggtaatgaattatccactaaagaacaaatttcaagaaatagtaaagcgttagaagagaagtatgttgcagaattacagttggaacgtttgaaaaaagacggtgaagtgagaggttcgattaaccgtttcaaaacatctgactatgtaaaagaagcaaagcagttattaaaagtacaaaaagcatatcatcaacttgatcaatcatttatagacacttatattgatttattggaaacaagaagaacatattatgagggaccaggtgaaggtagcccatttggatggaaagatattaaagaatggtatgaaatgttaatgggacattgtacgtatttcccagaagaattacgtagtgtgaaatatgcctataatgctgatttatataatgcgctgaatgatttgaacaacttggttattacacgagatgagaatgagaagctagagtattatgaaaaattccaaattatcgagaatgtctttaaacaaaagaaaaagccgacgcttaaacaaattgcgaaggaaatcttggtgaatgaagaagacatcaaaggctatcgtgtcacaagtacaggtaaaccagaatttacaaacttgaaagtttatcacgatatcaaagatattacagcaagaaaagaaattatcgagaatgcagagctactcgatcaaatagctaaaatattaactatttaccagtcatcagaagatatacaagaagaattaacaaacctaaattcagaattgacacaagaagagattgaacaaatttcaaacttgaaaggttatacaggaactcataacctttcactaaaggcaataaatttaatattagacgaattgtggcatacgaacgataatcaaatagctattttcaatcgtttgaaacttgtacctaaaaaggtagatttaagccaacaaaaagaaattcctactactttagttgatgattttatactgtctccagtagtgaaacgttcatttatacaatctattaaagttattaacgctattattaaaaaatacggtttgccaaatgatattattattgaacttgcgagagaaaagaattctaaagatgcacaaaaaatgattaatgaaatgcagaagagaaatcgtcaaacgaatgaacgtattgaggaaattataagaacgacaggtaaagaaaatgctaaatatttaattgaaaaaattaagctgcacgatatgcaagaagggaaatgtttatactcgttagaagcaatccctctagaagatttacttaataatccattcaattacgaagtagaccatatcattccacgttctgtttctttcgataactctttcaataataaagtgttggtgaaacaagaagaaaatagtaaaaaaggtaatagaacgccatttcaatatttaagttcttcagattctaaaataagttatgagacattcaaaaagcatattttaaatcttgctaaaggcaaaggtagaatctctaagacgaaaaaagaatatttgttagaagaacgagatatcaatcgcttcagtgtccaaaaagattttattaaccgtaacttagtagatacacgctatgcgacaagagggttaatgaacttattaagatcttattttagagtgaataacttagatgtcaaagtgaaatcgattaatggcggattcacaagtttcttaagaaggaaatggaagttcaaaaaagaaagaaataagggctacaaacaccatgctgaagatgcactgattattgcgaacgctgattttattttcaaagaatggaaaaaactagataaagctaaaaaagtgatggaaaatcaaatgtttgaagaaaagcaagctgaaagtatgcctgaaattgagactgagcaagagtataaagaaatttttataacgcctcatcaaattaaacatattaaggattttaaagattataaatattcacatagagttgataaaaagccgaatagagagttaataaatgatacattatattctacgagaaaagatgacaagggtaatacattaatcgttaataacttaaatggtttatacgataaagataatgataaattgaaaaaattaattaataaatcacctgaaaaattattgatgtatcatcatgatccacaaacatatcaaaaattaaaattgatcatggaacaatatggcgatgagaaaaatccgctttataaatattatgaagaaacaggcaattacttaacaaaatatagtaaaaaagataacggaccagtcatcaaaaaaattaaatattatggtaacaagctaaatgcgcatttagatattacggatgattatccaaatagcagaaataaagtagtaaaactttcattaaaaccatatcgctttgatgtttatttagataatggggtatataaatttgtgacagttaaaaatttagatgttatcaaaaaagaaaactactatgaagttaattcaaagtgttatgaagaagcaaaaaaactgaagaaaattagtaatcaagcagaatttatcgcaagtttttacaataatgacttgattaagattaacggagaattatatagagtcataggtgtaaataatgatctacttaacagaattgaagtaaatatgatagacatcacatatagagaatatttagagaacatgaatgataaaagaccacctagaataattaaaacaatagcaagcaaaacacaatctattaaaaagtattctacagatattctaggcaatctttatgaagtgaagagtaaaaagcatcctcaaatcataaagaaaggatga

SEQ ID NO: 26 - protein, 1629 aa, Francisella tularensis
MNFKILPIAIDLGVKNTGVFSAFYQKGTSLERLDNKNGKVYELSKDSYTLLMNNRTARRHQRRGIDRKQLVKRLFKLIWTEQLNLEWDKDTQQAISFLFNRRGFSFITDGYSPEYLNIVPEQVKAILMDIFDDYNGEDDLDSYLKLATEQESKISEIYNKLMQKILEFKLMKLCTDIKDDKVSTKTLKEITSYEFELLADYLANYSESLKTQKFSYTDKQGNLKELSYYHHDKYNIQEFLKRHATINDRILDTLLTDDLDIWNFNFEKFDFDKNEEKLQNQEDKDHIQAHLHHFVFAVNKIKSEMASGGRHRSQYFQEITNVLDENNHQEGYLKNFCENLHNKKYSNLSVKNLVNLIGNLSNLELKPLRKYFNDKIHAKADHWDEQKFTETYCHWILGEWRVGVKDQDKKDGAKYSYKDLCNELKQKVTKAGLVDFLLELDPCRTIPPYLDNNNRKPPKCQSLILNPKFLDNQYPNWQQYLQELKKLQSIQNYLDSFETDLKVLKSSKDQPYFVEYKSSNQQIASGQRDYKDLDARILQFIFDRVKASDELLLNEIYFQAKKLKQKASSELEKLESSKKLDEVIANSQLSQILKSQHTNGIFEQGTFLHLVCKYYKQRQRARDSRLYIMPEYRYDKKLHKYNNTGRFDDDNQLLTYCNHKPRQKRYQLLNDLAGVLQVSPNFLKDKIGSDDDLFISKWLVEHIRGFKKACEDSLKIQKDNRGLLNHKINIARNTKGKCEKEIFNLICKIEGSEDKKGNYKHGLAYELGVLLFGEPNEASKPEFDRKIKKFNSIYSFAQIQQIAFAERKGNANTCAVCSADNAHRMQQIKITEPVEDNKDKIILSAKAQRLPAIPTRIVDGAVKKMATILAKNIVDDNWQNIKQVLSAKHQLHIPIITESNAFEFEPALADVKGKSLKDRRKKALERISPENIFKDKNNRIKEFAKGISAYSGANLTDGDFDGAKEELDHIIPRSHKKYGTLNDEANLICVTRGDNKNKGNRIFCLRDLADNYKLKQFETTDDLEIEKKIADTIWDANKKDFKFGNYRSFINLTPQEQKAFRHALFLADENPIKQAVIRAINNRNRTFVNGTQRYFAEVLANNIYLRAKKENLNTDKISFDYFGIPTIGNGRGIAEIRQLYEKVDSDIQAYAKGDKPQASYSHLIDAMLAFCIAADEHRNDGSIGLEIDKNYSLYPLDKNTGEVFTKDIFSQIKITDNEFSDKKLVRKKAIEGFNTHRQMTRDGIYAENYLPILIHKELNEVRKGYTWKNSEEIKIFKGKKYDIQQLNNLVYCLKFVDKPISIDIQISTLEELRNILTTNNIAATAEYYYINLKTQKLHEYYIENYNTALGYKKYSKEMEFLRSLAYRSERVKIKSIDDVKQVLDKDSNFIIGKITLPFKKEWQRLYREWQNTTIKDDYEFLKSFFNVKSITKLHKKVRKDFSLPISTNEGKFLVKRKTWDNNFIYQILNDSDSRADGTKPFIPAFDISKNEIVEAIIDSFTSKNIFWLPKNIELQKVDNKNIFAIDTSKWFEVETPSDLRDIGIATIQYKIDNNSRPKVRVKLDYVIDDDSKINYFMNHSLLKSRYPDKVLEILKQSTIIEFESSGFNKTIKEMLGMKLAGIYNETSNN

SEQ ID NO: 27 - DNA, 4890 bp, Francisella tularensis
atgaatttcaaaatattgccaatagcaatagatttaggtgttaaaaatactggtgtctttagcgcattttatcaaaaaggaacttctcttgagagattggataataaaaatggcaaagtatatgaactatcaaaagattcttatactttattgatgaataatagaacagcaagaagacatcaaagaagagggatagatagaaagcagctagtcaaaaggctctttaagcttatttggacagagcagctaaatttagagtgggataaagacactcaacaagcaattagctttttatttaatcgtagaggttttagttttattactgatggttattcgcctgaatatttaaatattgttccagagcaagtaaaagcgatacttatggatatatttgatgattacaacggtgaagatgatttagacagttatttaaaattagctactgagcaagaaagcaaaatttctgaaatttataacaagctaatgcaaaaaatattagagtttaaattaatgaaattatgtactgatattaaggatgataaagtaagtactaaaacgcttaaagaaatcacaagctatgaatttgagttattagctgattatttagcaaactatagcgagagtttaaaaacacaaaaatttagttatacagataaacaaggtaatttaaaagagctaagctactatcatcatgataaatataatattcaagaatttctaaagcgacatgctactataaatgatcgaattttagatactcttttaactgatgatttagatatttggaattttaattttgagaaatttgattttgataagaatgaagaaaagcttcagaatcaggaagataaagatcatatacaagcgcatttacatcattttgtttttgcagtaaataaaataaaaagtgaaatggcaagtggtggtcgtcatcgtagccaatattttcaagagataacaaatgtgctagatgaaaataatcatcaagagggatatctcaagaatttctgtgaaaatttgcataataaaaaatattcaaatttaagtgttaaaaatttagttaatctaattggtaacctaagtaatttagagctaaaaccgctaagaaaatattttaatgacaaaattcacgcaaaagctgatcattgggatgagcaaaagtttacagaaacttattgccactggatattaggagagtggcgagtaggtgtcaaagatcaagataagaaagatggcgctaaatatagttataaagatctgtgtaatgaattaaaacaaaaagttactaaggctggtttggtagattttttattagagttagatccatgtagaactataccaccatatctggataacaataaccgtaaaccaccaaaatgtcaaagtttgattttaaatccgaagtttttagataatcaatatccaaactggcaacaatatttacaagaattaaagaaactacaaagtattcaaaattatttagacagttttgaaactgatttaaaagtcttaaagtcaagtaaagatcaaccatattttgttgaatacaagagttcaaatcagcaaatagcaagtggtcaaagagattataaagatttagatgctcgaatattacagtttatatttgatagggtaaaagctagtgatgagttgcttttgaatgagatttattttcaggctaaaaaacttaaacaaaaagctagctctgagttagaaaaactcgagtcgagcaaaaagctagatgaagttatagcaaatagtcaactatcacagatactaaagtctcaacatacaaatggtatttttgaacagggtacttttttgcatttggtttgtaaatattataaacaaagacaaagagcgagagactctaggctatatattatgcctgaatatcgttatgataaaaaactacataaatataacaatacaggcaggtttgatgatgataatcagctgctaacatattgtaatcataagccaagacaaaaaagataccaattgttaaatgatttagctggggtgttgcaggtatcacctaattttttgaaagataaaattggttctgatgatgatctatttattagcaaatggttggtagagcatattagaggatttaaaaaagcttgtgaagatagtttaaaaatacaaaaagacaatagaggattattaaatcataaaataaatatagctaggaatacaaaaggcaaatgtgaaaaagaaatatttaatttaatatgtaaaatagaaggttcagaagataaaaaaggtaattacaagcatggtttagcttacgaattaggagtacttttatttggtgaacctaatgaagctagtaaacctgagttcgatagaaaaattaaaaaatttaactcaatatacagttttgcacagattcaacaaattgcttttgcagagcgtaaaggcaatgctaacacttgtgcagtttgtagtgctgataatgctcatagaatgcaacaaattaagatcactgagcctgtagaggacaataaagataagataatcttaagtgccaaagctcagagactaccagcgattccaactagaatagttgacggtgcggttaagaaaatggcaactatattagctaaaaatatagttgatgataattggcagaatatcaaacaagttttatcagcaaaacatcagttacatatacctattatcacagaatcaaatgcttttgagtttgaaccagcattagctgatgtaaaaggtaagagcctaaaagataggagaaaaaaagcattagagagaataagtcctgaaaatatattcaaggataaaaacaatagaataaaagaatttgctaaaggtatatcagcatatagtggtgctaatttaactgatggcgattttgatggtgcaaaagaagaattagatcatataatacctcgttcacataaaaaatacggtactctaaatgatgaagcaaatctaatttgtgtaactcgtggtgataataaaaataaaggtaatagaattttctgcctacgtgatcttgcagataactataaactaaaacagtttgagacaactgatgatttagaaattgaaaagaagatagctgatacaatctgggatgctaacaagaaagattttaaatttggtaattatcgtagttttattaacctaacaccacaagagcagaaagcatttcgtcacgcgctatttctggctgatgaaaatcctatcaaacaagcagtcataagagcgataaataatcgtaatcgtacatttgtaaatggcactcaacgctattttgcagaagtactggcaaacaatatctatctaagggctaaaaaagaaaatctaaatacagataaaatttcatttgattattttggtattccaactataggtaatggtagaggtattgctgaaatccgtcaactttatgaaaaagttgatagtgatatacaagcttatgcaaaaggtgataaacctcaagctagctactctcacctaatagatgcgatgctggctttttgtattgctgctgatgaacacagaaatgatggaagtataggtctagaaatcgataaaaattatagtttatatccattagataaaaatacaggagaagtctttaccaaagatatttttagtcaaattaaaattactgataatgagtttagcgataaaaaattagtaagaaaaaaagctatagagggctttaacacgcatagacaaatgactagagatggcatttatgcagaaaattacctaccaatactaatccataaagaactaaatgaagttagaaaaggctatacttggaaaaatagtgaagaaataaaaatattcaaaggtaaaaagtacgatatacaacaattgaataaccttgtgtattgtctaaaatttgtagataaacctatatctatagatatacaaattagtaccttagaagagttaagaaatatattaacaacaaataatatagctgctacagcagaatactattatataaatctaaaaacccaaaaattacatgagtattatatcgaaaactataatactgccttaggttataaaaaatacagtaaagaaatggagtttttgagaagcttagcttatcgtagcgaaagggtaaaaattaaatcaatagatgatgtaaagcaggttttggataaggatagtaactttatcatcggtaagattactttaccatttaaaaaagagtggcaaagactatatcgtgagtggcaaaatacaactatcaaagatgattatgagtttttaaaatcattctttaatgttaaaagtattactaagttgcataaaaaagttagaaaagatttctctttacctatttctacaaatgaaggtaaattcctggtcaaaagaaaaacatgggataacaattttatctatcagatattaaatgattctgattctagagcagacggaacaaagccatttattccagcttttgacatttctaaaaatgaaatagtcgaagccataattgattcatttacatcaaaaaatattttttggctgcctaaaaatatagaattacaaaaggtggataataaaaacatttttgctatagatactagtaaatggttcgaagtagaaacacctagtgatcttagagacattggaatagcaacaattcaatacaagatagataataattctcgccctaaagtcagagttaaacttgattatgttatcgatgatgatagtaagataaattattttatgaatcattctttattaaaatcaagatatcctgacaaagttttagaaattttaaaacaatcaactattatagaatttgaaagttcaggttttaataaaactatcaaagaaatgcttggtatgaaattagcaggtatttataatgaaacatctaataattag

SEQ ID NO: 28 - protein, 1300 aa, Francisella tularensis subsp. novicida (strain U112)
MSIYQEFVNKYSLSKTLRFELIPQGKTLENIKARGLILDDEKRAKDYKKAKQIIDKYHQFFIEEILSSVCISEDLLQNYSDVYFKLKKSDDDNLQKDFKSAKDTIKKQISEYIKDSEKFKNLFNQNLIDAKKGQESDLILWLKQSKDNGIELFKANSDITDIDEALEIIKSFKGWTTYFKGFHENRKNVYSSNDIPTSIIYRIVDDNLPKFLENKAKYESLKDKAPEAINYEQIKKDLAEELTFDIDYKTSEVNQRVFSLDEVFEIANFNNYLNQSGITKFNTIIGGKFVNGENTKRKGINEYINLYSQQINDKTLKKYKMSVLFKQILSDTESKSFVIDKLEDDSDVVTTMQSFYEQIAAFKTVEEKSIKETLSLLFDDLKAQKLDLSKIYFKNDKSLTDLSQQVFDDYSVIGTAVLEYITQQIAPKNLDNPSKKEQELIAKKTEKAKYLSLETIKLALEEFNKHRDIDKQCRFEEILANFAAIPMIFDEIAQNKDNLAQISIKYQNQGKKDLLQASAEDDVKAIKDLLDQTNNLLHKLKIFHISQSEDKANILDKDEHFYLVFEECYFELANIVPLYNKIRNYITQKPYSDEKFKLNFENSTLANGWDKNKEPDNTAILFIKDDKYYLGVMNKKNNKIFDDKAIKENKGEGYKKIVYKLLPGANKMLPKVFFSAKSIKFYNPSEDILRIRNHSTHTKNGSPQKGYEKFEFNIEDCRKFIDFYKQSISKHPEWKDFGFRFSDTQRYNSIDEFYREVENQGYKLTFENISESYIDSVVNQGKLYLFQIYNKDFSAYSKGRPNLHTLYWKALFDERNLQDVVYKLNGEAELFYRKQSIPKKITHPAKEAIANKNKDNPKKESVFEYDLIKDKRFTEDKFFFHCPITINFKSSGANKFNDEINLLLKEKANDVHILSIDRGERHLAYYTLVDGKGNIIKQDTFNIIGNDRMKTNYHDKLAAIEKDRDSARKDWKKINNIKEMKEGYLSQVVHEIAKLVIEYNAIVVFEDLNFGFKRGRFKVEKQVYQKLEKMLIEKLNYLVFKDNEFDKTGGVLRAYQLTAPFETFKKMGKQTGIIYYVPAGFTSKICPVTGFVNQLYPKYESVSKSQEFFSKFDKICYNLDKGYFEFSFDYKNFGDKAAKGKWTIASFGSRLINFRNSDKNHNWDTREVYPTKELEKLLKDYSIEYGHGECIKAAICGESDKKFFAKLTSVLNTILQMRNSKTGTELDYLISPVADVNGNFFDSRQAPKNMPQDADANGAYHIGLKGLMLLGRIKNNQEGKKLNLVIKNEEYFEFVQNRNN

SEQ ID NO: 29 - protein, 1307 aa, Acidaminococcus sp. (strain BV3L6)
MTQFEGFTNLYQVSKTLRFELIPQGKTLKHIQEQGFIEEDKARNDHYKELKPIIDRIYKTYADQCLQLVQLDWENLSAAIDSYRKEKTEETRNALIEEQATYRNAIHDYFIGRTDNLTDAINKRHAEIYKGLFKAELFNGKVLKQLGTVTTTEHENALLRSFDKFTTYFSGFYENRKNVFSAEDISTAIPHRIVQDNFPKFKENCHIFTRLITAVPSLREHFENVKKAIGIFVSTSIEEVFSFPFYNQLLTQTQIDLYNQLLGGISREAGTEKIKGLNEVLNLAIQKNDETAHIIASLPHRFIPLFKQILSDRNTLSFILEEFKSDEEVIQSFCKYKTLLRNENVLETAEALFNELNSIDLTHIFISHKKLETISSALCDHWDTLRNALYERRISELTGKITKSAKEKVQRSLKHEDINLQEIISAAGKELSEAFKQKTSEILSHAHAALDQPLPTTLKKQEEKEILKSQLDSLLGLYHLLDWFAVDESNEVDPEFSARLTGIKLEMEPSLSFYNKARNYATKKPYSVEKFKLNFQMPTLASGWDVNKEKNNGAILFVKNGLYYLGIMPKQKGRYKALSFEPTEKTSEGFDKMYYDYFPDAAKMIPKCSTQLKAVTAHFQTHTTPILLSNNFIEPLEITKEIYDLNNPEKEPKKFQTAYAKKTGDQKGYREALCKWIDFTRDFLSKYTKTTSIDLSSLRPSSQYKDLGEYYAELNPLLYHISFQRIAEKEIMDAVETGKLYLFQIYNKDFAKGHHGKPNLHTLYWTGLFSPENLAKTSIKLNGQAELFYRPKSRMKRMAHRLGEKMLNKKLKDQKTPIPDTLYQELYDYVNHRLSHDLSDEARALLPNVITKEVSHEIIKDRRFTSDKFFFHVPITLNYQAANSPSKFNQRVNAYLKEHPETPIIGIDRGERNLIYITVIDSTGKILEQRSLNTIQQFDYQKKLDNREKERVAARQAWSVVGTIKDLKQGYLSQVIHEIVDLMIHYQAVVVLENLNFGFKSKRTGIAEKAVYQQFEKMLIDKLNCLVLKDYPAEKVGGVLNPYQLTDQFTSFAKMGTQSGFLFYVPAPYTSKIDPLTGFVDPFVWKTIKNHESRKHFLEGFDFLHYDVKTGDFILHFKMNRNLSFQRGLPGFMPAWDIVFEKNETQFDAKGTPFIAGKRIVPVIENHRFTGRYRDLYPANELIALLEEKGIVFRDGSNILPKLLENDDSHAIDTMVALIRSVLQMRNSNAATGEDYINSPVRDLNGVCFDSRFQNPEWPMDADANGAYHIALKGQLLLNHLKESKDLKLQNGISNQDWLAYIQELRN

SEQ ID NO: 30 - protein, 1064 aa, Bradyrhizobium sp. BTAi1
MKRTSLRAYRLGVDLGANSLGWFVVWLDDHGQPEGLGPGGVRIFPDGRNPQSKQSNAAGRRLARSARRRRDRYLQRRGKLMGLLVKHGLMPADEPARKRLECLDPYGLRAKALDEVLPLHHVGRALFHLNQRRGLFANRAIEQGDKDASAIKAAAGRLQTSMQACGARTLGEFLNRRHQLRATVRARSPVGGDVQARYEFYPTRAMVDAEFEAIWAAQAPHHPTMTAEAHDTIREAIFSQRAMKRPSIGKCSLDPATSQDDVDGFRCAWSHPLAQRFRIWQDVRNLAVVETGPTSSRLGKEDQDKVARALLQTDQLSFDEIRGLLGLPSDARFNLESDRRDHLKGDATGAILSARRHFGPAWHDRSLDRQIDIVALLESALDEAAIIASLGTTHSLDEAAAQRALSALLPDGYCRLGLRAIKRVLPLMEAGRTYAEAASAAGYDHALLPGGKLSPTGYLPYYGQWLQNDVVGSDDERDTNERRWGRLPNPTVHIGIGQLRRVVNELIRWHGPPAEITVELTRDLKLSPRRLAELEREQAENQRKNDKRTSLLRKLGLPASTHNLLKLRLWDEQGDVASECPYTGEAIGLERLVSDDVDIDHLIPFSISWDDSAANKVVCMRYANREKGNRTPFEAFGHRQGRPYDWADIAERAARLPRGKRWRFGPGARAQFEELGDFQARLLNETSWLARVAKQYLAAVTHPHRIHVLPGRLTALLRATWELNDLLPGSDDRAAKSRKDHRHHAIDALVAALTDQALLRRMANAHDDTRRKIEVLLPWPTFRIDLETRLKAMLVSHKPDHGLQARLHEDTAYGTVEHPETEDGANLVYRKTFVDISEKEIDRIRDRRLRDLVRAHVAGERQQGKTLKAAVLSFAQRRDIAGHPNGIRHVRLTKSIKPDYLVPIRDKAGRIYKSYNAGENAFVDILQAESGRWIARATTVFQANQANESHDAPAAQPIMRVFKGDMLRIDHAGAEKFVKIVRLSPSNNLLYLVEHHQAGVFQTRHDDPEDSFRWLFASFDKLREWNAELVRIDTLGQPWRRKRGLETGSEDATRIGWTRPKKWP

SEQ ID NO: 31 - protein, 1035 aa, Candidatus Puniceispirillum marinum
MRRLGLDLGTNSIGWCLLDLGDDGEPVSIFRTGARIFSDGRDPKSLGSLKATRREARLTRRRRDRFIQRQKNLINALVKYGLMPADEIQRQALAYKDPYPIRKKALDEAIDPYEMGRAIFHINQRRGFKSNRKSADNEAGVVKQSIADLEMKLGEAGARTIGEFLADRQATNDTVRARRLSGTNALYEFYPDRYMLEQEFDTLWAKQAAFNPSLYIEAARERLKEIVFFQRKLKPQEVGRCIFLSDEDRISKALPSFQRFRIYQELSNLAWIDHDGVAHRITASLALRDHLFDELEHKKKLTFKAMRAILRKQGVVDYPVGFNLESDNRDHLIGNLTSCIMRDAKKMIGSAWDRLDEEEQDSFILMLQDDQKGDDEVRSILTQQYGLSDDVAEDCLDVRLPDGHGSLSKKAIDRILPVLRDQGLIYYDAVKEAGLGEANLYDPYAALSDKLDYYGKALAGHVMGASGKFEDSDEKRYGTISNPTVHIALNQVRAVVNELIRLHGKPDEVVIEIGRDLPMGADGKRELERFQKEGRAKNERARDELKKLGHIDSRESRQKFQLWEQLAKEPVDRCCPFTGKMMSISDLFSDKVEIEHLLPFSLTLDDSMANKTVCFRQANRDKGNRAPFDAFGNSPAGYDWQEILGRSQNLPYAKRWRFLPDAMKRFEADGGFLERQLNDTRYISRYTTEYISTIIPKNKIWVVTGRLTSLLRGFWGLNSILRGHNTDDGTPAKKSRDDHRHHAIDAIVVGMTSRGLLQKVSKAARRSEDLDLTRLFEGRIDPWDGFRDEVKKHIDAIIVSHRPRKKSQGALHNDTAYGIVEHAENGASTVVHRVPITSLGKQSDIEKVRDPLIKSALLNETAGLSGKSFENAVQKWCADNSIKSLRIVETVSIIPITDKEGVAYKGYKGDGNAYMDIYQDPTSSKWKGEIVSRFDANQKGFIPSWQSQFPTARLIMRLRINDLLKLQDGEIEEIYRVQRLSGSKILMAPHTEANVDARDRDKNDTFKLTSKSPGKLQSASARKVHISPTGLIREG

SEQ ID NO: 32 - protein, 1358 aa, Acidaminococcus
MGKMYYLGLDIGTNSVGYAVTDPSYHLLKFKGEPMWGAHVFAAGNQSAERRSFRTSRRRLDRRQQRVKLVQEIFAPVISPIDPRFFIRLHESALWRDDVAETDKHIFFNDPTYTDKEYYSDYPTIHHLIVDLMESSEKHDPRLVYLAVAWLVAHRGHFLNEVDKDNIGDVLSFDAFYPEFLAFLSDNGVSPWVCESKALQATLLSRNSVNDKYKALKSLIFGSQKPEDNFDANISEDGLIQLLAGKKVKVNKLFPQESNDASFTLNDKEDAIEEILGTLTPDECEWIAHIRRLFDWAIMKHALKDGRTISESKVKLYEQHHHDLTQLKYFVKTYLAKEYDDIFRNVDSETTKNYVAYSYHVKEVKGTLPKNKATQEEFCKYVLGKVKNIECSEADKVDFDEMIQRLTDNSFMPKQVSGENRVIPYQLYYYELKTILNKAASYLPFLTQCGKDAISNQDKLLSIMTFRIPYFVGPLRKDNSEHAWLERKAGKIYPWNFNDKVDLDKSEEAFIRRMTNTCTYYPGEDVLPLDSLIYEKFMILNEINNIRIDGYPISVDVKQQVFGLFEKKRRVTVKDIQNLLLSLGALDKHGKLTGIDTTIHSNYNTYHHFKSLMERGVLTRDDVERIVERMTYSDDTKRVRLWLNNNYGTLTADDVKHISRLRKHDFGRLSKMFLTGLKGVHKETGERASILDFMWNTNDNLMQLLSECYTFSDEITKLQEAYYAKAQLSLNDFLDSMYISNAVKRPIYRTLAVVNDIRKACGTAPKRIFIEMARDGESKKKRSVTRREQIKNLYRSIRKDFQQEVDFLEKILENKSDGQLQSDALYLYFAQLGRDMYTGDPIKLEHIKDQSFYNIDHIYPQSMVKDDSLDNKVLVQSEINGEKSSRYPLDAAIRNKMKPLWDAYYNHGLISLKKYQRLTRSTPFTDDEKWDFINRQLVETRQSTKALAILLKRKFPDTEIVYSKAGLSSDFRHEFGLVKSRNINDLHHAKDAFLAIVTGNVYHERFNRRWFMVNQPYSVKTKTLFTHSIKNGNFVAWNGEEDLGRIVKMLKQNKNTIHFTRFSFDRKEGLFDIQPLKASTGLVPRKAGLDVVKYGGYDKSTAAYYLLVRFTLEDKKTQHKLMMIPVEGLYKARIDHDKEFLTDYAQTTISEILQKDKQKVINIMFPMGTRHIKLNSMISIDGFYLSIGGKSSKGKSVLCHAMVPLIVPHKIECYIKAMESFARKFKENNKLRIVEKFDKITVEDNLNLYELFLQKLQHNPYNKFFSTQFDVLTNGRSTFTKLSPEEQVQTLLNILSIFKTCRSSGCDLKSINGSAQAARIMISADLTGLSKKYSDIRLVEQSASGLFVSKSQNLLEYL

SEQ ID NO: 33 - protein, 1358 aa, Acidaminococcus sp. D21; identical to SEQ ID NO: 32

SEQ ID NO: 34 - protein, 1138 aa, Acidothermus cellulolyticus
MGGSEVGTVPVTWRLGVDVGERSIGLAAVSYEEDKPKEILAAVSWIHDGGVGDERSGASRLALRGMARRARRLRRFRRARLRDLDMLLSELGWTPLPDKNVSPVDAWLARKRLAEEYVVDETERRRLLGYAVSHMARHRGWRNPWTTIKDLKNLPQPSDSWERTRESLEARYSVSLEPGTVGQWAGYLLQRAPGIRLNPTQQSAGRRAELSNATAFETRLRQEDVLWELRCIADVQGLPEDVVSNVIDAVFCQKRPSVPAERIGRDPLDPSQLRASRACLEFQEYRIVAAVANLRIRDGSGSRPLSLEERNAVIEALLAQTERSLTWSDIALEILKLPNESDLTSVPEEDGPSSLAYSQFAPFDETSARIAEFIAKNRRKIPTFAQWWQEQDRTSRSDLVAALADNSIAGEEEQELLVHLPDAELEALEGLALPSGRVAYSRLTLSGLTRVMRDDGVDVHNARKTCFGVDDNWRPPLPALHEATGHPVVDRNLAILRKFLSSATMRWGPPQSIVVELARGASESRERQAEEEAARRAHRKANDRIRAELRASGLSDPSPADLVRARLLELYDCHCMYCGAPISWENSELDHIVPRTDGGSNRHENLAITCGACNKEKGRRPFASWAETSNRVQLRDVIDRVQKLKYSGNMYWTRDEFSRYKKSVVARLKRRTSDPEVIQSIESTGYAAVALRDRLLSYGEKNGVAQVAVFRGGVTAEARRWLDISIERLFSRVAIFAQSTSTKRLDRRHHAVDAVVLTTLTPGVAKTLADARSRRVSAEFWRRPSDVNRHSTEEPQSPAYRQWKESCSGLGDLLISTAARDSIAVAAPLRLRPTGALHEETLRAFSEHTVGAAWKGAELRRIVEPEVYAAFLALTDPGGRFLKVSPSEDVLPADENRHIVLSDRVLGPRDRVKLFPDDRGSIRVRGGAAYIASFHHARVFRWGSSHSPSFALLRVSLADLAVAGLLRDGVDVFTAELPPWTPAWRYASIALVKAVESGDAKQVGWLVPGDELDFGPEGVTTAAGDLSMFLKYFPERHWVVTGFEDDKRINLKPAFLSAEQAEVLRTERSDRPDTLTEAGEILAQFFPRCWRATVAKVLCHPGLTVIRRTALGQPRWRRGHLPYSWRPWSADPWSGGTP

SEQ ID NO: 35 - protein, 1045 aa, Acidovorax avenae
MQKEKPLAYRLALDLGSTSLGWAVLRLSAPGEPSAVIRAGSRIFSDGRNPKDGSSLAVTRRAARAMRRRRDRLLKRKARMLAALERHGFFPQDEAARKALEKLNPYGLRARGLESALKPEEFGRALFHLNQRRGFQSNRKTDRKDSDSGALKQAIGTLRAQMHESGCRTVGEWFWKVRMERKPEGVKGQGVRARYRETPFTTDEGKKRIDKRYDLYVDRAMVAQEFDALWAAQATFAPALFNEAARAELRDILLHQRKLRPVQPGRCTLVPEEPRALLALPSTQRFRIYQEVNHLRVLHDELREEALTLAQRDQIVALLERQAKVTFTAMRKALGFSALFNLEDAKRDGLKGNATTAALGKKDLFGPLWAGFDTALQDEIVTQLMTEESEPRLIAWLQEHTGVDEARAQAIANAGLPEGYGSLGRTALARIVPELQRDVITYDKAVQAAGFAHHSDLGFSFEHDADEVERIGERTIASTGEIKPVFAFKQLPYYGRALQRHVAFAKENPRNDEERYGKIANPTVHIGLNQVRVVVNALMCRYGRPTEVVIELARDLKQSREQKLEAQQRQADNQKRNARIRRSIAEVLGISEERVRTLDIQKWILWEELSHDAADRRCPYSGVQISASMLLGERVEIEHILPFSMTLDDSLNNRTVALREANRIKRNRTPWDARTDFEAHGWSYDGILQRAERMPQRKRHRFAPDGYERWLGEDKDFLARALNDTRYLSRVAAEYLRLVCPGSATRVIPGQMTALLRGKFGLNDVLGLDGEKNRNDHRHHAVDACVIGVTDQRMMQRFAQANAQAREDGLTRLVEDMPLPWPTYRAHVERAVRHIWVSHKPDHGFEGAMMEETSYGILRDGTIKQRRKADGSAGREISRLIRITEPSQPQRHGVDAEGRPLPYKGYVGGSNYCLEITVNDKGKWEGQVISTFDAYRIVREGGLRQLRHSTQGQNGQALAMRLVIGDSVRLEVDEQERVMRIVKINGNNGQVFMAPVHEANVDARNSDKNEAFAYTSKIAGSFQKTKARQVTISPIGELRDPGFKG

SEQ ID NO: 36 - protein, 1131 aa, Acidovorax ebreus
MAQHVFGLDIGIASVGWAILGEQRIIDLGVRCFDKAETAKEGDPLNLTRRQARLLRRRLYRRAWRLTQLSRLLKRKGLIADAKLFAKAPSYGDSAWELRRQGLDRLLTPLEWARVIYHQCKHRGFHWTSKAEEAKADSDAEGGRVKQGLAHTKALMQAKNYRSAAEMVLAEFPDAQRNKRGQYDKALSRVLLGEELALLFATQRRLGNPHASDFFEKLILGDGDRKSGLFWQQKPALSGADLLKMLGKCTFEKGEYRAPKASFSVERHVWLTRLNNLRIVVDGRSRPLNEAERQAALLLPYQTETSKYKTLKNAFIKAGLWGDGVRFGGLAYPSQAQIDAEKTKDPEDQFLVKLPAWHELRKAFKAAGHEALWQQISTPALDGDPTLLDQIATVLSVYKDGAEVVQQLRQLALPEPAASIAVLEKISFDKFSSLSLKALRRIVPLMQSGLRYDEAVAQIPEYGHHSQRIEPGAAKHLYLPPFYEAQRKYAGKGDHIGSMQFRDDADIPRNPVVLRALNQARKVVNALIREYGSPIAVNIEMARDLSRPLDERNKVKRAQEEFRDRNDRARSEFERDFGYKPKAAAFEKWMLYREQLGQCAYSQQPLDIQRVLDDHNYAQVDHALPYSRSYDDSKNNKVLVLTHENQNKGNRTAFEYLTSFPDGEDGERWRTFVAWVQGNKAYRMAKRNRLLRKNYGVDESKGFIDRNLNDTRYICKFFKNYVEEHLQLAARADGDTARRCVVVNGQLTAFLRARWGLTKVRGDSDRHHALDAAVVAACTHGMVKALADYSRRKEISFLQEGFPDPETGEILNPAAFDRARQHFPEPWTHFAHELKARLFTDDLAALREDMQRLGSYTTEDLGRLRTLFVSRAPQRRSGGAVHKETIYAQPESLKQQGGVIEKILLTSLKLQDFDKLLNPESNDHFVEPHRNERLYAAIRQRLEQFGGRADKAFGPDNLFHKPDKNNQPTGPVVRSIKLVRGKQTGIPIRGGLAKNDSMLRVDIFTKAGKFHLVPVYVHHRVTGLPNRAIVAFKDEDEWTLIDESFAFLFSVYPNDYVKVTLKKEQQSGYYSGADRSTGAMNLWAHDRAASVGKDGLIRGIGVKTALSVEKFNVDVLGRIYLAPPETRSGLA

SEQ ID NO: 37 - protein, 1056 aa, Actinobacillus minor NM305
MKALNYILGLDLGIASVGWAVVEIDQNELPIRLIDLGVRTFERAEVPKTGDSLALARRLARSSRRLVRRRAVRLLKAKRLLKQEGILQADDFHSSHLKPLPNNPWELRVKGLNHLLDRKEWAAVLLHLLKHRGYLSQRKNESKTDNKELGALLKGVSENRQLLQAQAFSTPAEIAIKKFQQEEGHIRNQRGAYSHTFDRNDLLAELRLLFQKQREFNNPYTSQSLEQAIAELLMWQKPALSGEAILKMLGKCTFEPSEYKAPKNSYSAEYFVWLTKLNNLRILENGADRGLTAEERQLLINQPFEKAKFTYAQARKLLELSDLAIFKGVRYGKDNAESATLMEMKAWHAIRKALESNGLKTEWNGLKTKPELLDKIGTAFSIYKTDEDISQYLNGELSPAVLNALLENLSFDKFIRLSLQSLAKILPLMEQGLRYDEACKQVYGDHYGKKEQLELRFLPKIPVEDIRNPVVLRTLSQARKVINGVVRLYGSPARIHIETGREVGKSFSERRDISKRQEENRNERQRAVEKFKEFFPHFVGEPKAKDILKMRLYEQQHGKCLYSGKELDLNRLLEKGYVEIDHALPFSRTWDDSFNNKVLVLASENQNKGNQTPYEWLNGKENAERWKLFQALVNGSRFPYSKKQRILTKYLDEDGFRERNLNDTRYVARFLCNFIEDNMQLVGQGKKRVFASNGQITALLRRSWGIQKVREDNDRHHAVDAVVVACSTRALQKKITDYVRYKEMNVFTGEKIDQETGEIIKFHFPEPWKFFRQEVEIRVFSETPAEDVVIALPDRPQANHEFIQPLFVSRAPTRKMTGQGHMETIKSAKRLAEGLSVSRVPLTQLKLKDLENMVNREREKALYEALKVRLEKFNNDPAKAFADPFYKKGGQQVKAVRVEQVQKSGVLVRQENGVADNASMVRVDVFIKGGKYFLVPIYTWQVAKGILPNRAATQGKEEEYWDIMDETAIFQFSLYQNDLIKLVTKKKTIFGYFNGLNRATSNINIKEHDLDKSKGKDGIYLEVGVKLALSLEKYQVDELGKNIQPCRSMKKRPPVR

SEQ ID NO: 38 - protein, 1054 aa, Actinobacillus pleuropneumoniae serovar 10 str. D13039
MKLTPLNYILGLDLGIASVGWAVVEIDEQENPLGLIDVGVRTFDRAEVAKTGESLALARRLARSSRRLVKRRADRIKKVKRLLKSENILLSADEQLPNDVWQLRVKGLDQKLERQEWAAVLLHLLKHRGYLSQRKNESKSENKELGALRSGVAANHQILQSAEYRTPAEIAVKKFHVEEGHIRNQRGAYTHTFSRLDLLAEIELLFTRQTELGNPHTSAKLLENLTALLMWQKPALAGEAILKMLGKCTFEPTEYKAAKNSYSAERFVWLTKLNNLRILEQGAERALTDNERFALLDQPYEKAKFTYAQARTMLALPDEAIFKGVRYQGEDKKAVETKTILMEMKAYHQIRKALENADLKAEWNELKNNSELLDDIGTAFSLHKTDEDICRYLDGKLSESILNALLENLNFDKFIQLSLKALQQILPLMLQGQRYDEAVSAIYGDHYGKKSAEINRLLPTIPADEIRNPVVLRTLTQARKVINAVVRLYGSPARIHIETGREVGKSYQDRKKLEKQQEDNRKHRESAVQKFKEYFPNFVGEPKGKDILKMRLYELQQAKCLYSGKSLELHRLLEKGYVEVDHALPFSRTWDDSFNNKVLVLANENQNKGNLTPYEWLDGKNNSEPWQNFVARVQTSGFSHTKKQRILSHKLDEKGFIERNLNDTRYVVRFLCNFIADNMLLTGKGKRKVFASNGQITALLRGRWGLQKVRDDNDRHHALDAVVVACSTVAMQQKITRFVRYEEGNVFSGERIDRETGEIIPLHFPSPWAFFRENVEIRIFSENPKLELENRLPDYPQYNHEFVQPLFVSRMPTRKMTGQGHMETVKSAKRLDEGLSVLKVPLTQLKLNDLERMVNREREMALYESLKVRLEQFDNDPAKAFAEPFYKKGGALVKAVRVEQTQKSGVLVRDGNGVADNASMVRVDVFTKAGKYFLVPIYTWQVAKGILPNKAVTANVDEIDWLEMDESYQFIFTMYPNDLVKVKLKKEEFFGYYGGLDRATGAIVIKEHDLEKSKGRQGIYRIGVKLALSFEKYQVDELGKNIRPCRPTKRQHVR

SEQ ID NO: 39 - protein, 1062 aa, Actinobacillus succinogenes
MNLNYILGLDLGIASVGWAVVEIDEQENPQRLIDVGVRTFDRAEVLKTGESLALARRLARSSRRLVKRRAERIKKAKRLLKAENLLLSADEILPNEAWQLRVKGLDQKLERQEWAAVLLHLLKHRGYLSQRKNESKSENKELGALLSGVAINHQILQSAEYRTPAEIAVNKFQAEEGHIRNQRGAYTHTFSRLDLLAEMELLFQRQATLGNPHTSTKLLENLTALLMWQKPALAGEAILKMLGKCTFEPTEYKAAKNSYSAERFVWLTKLNNLRILEQGAERALTDNERFALLDQPYEKAKLTYAQVRTLLGLSDEAIFKGLRYQGEDKKAVETKTTLMEVKAYHQIRKALEGLDLKAEWNELKNNPALLDEIGTAFSLYKTDDDIHRYLDGKLSESVLNALLENLNFDKFIQLSLKALQQILPLMLQGQRYDEAVSAIYGDHYGKKSDEIDRLLPNIPTDEIRNPVVLRTLTQARKVINAVVRLYGSPARIHIETGREVGKSYQDRKKLEKQQEENRKQRENAVKKFKEYFPNFVGEPKGKDILKMRLYELQQAKCLYSGKSLELYRLLEKGYVEVDHALPFSRTWDDSFNNKVLVLANENQNKGNATPYEWLDGKNNSEGWQHFVARVQTSGFSYAKKQRVLIQELDEKSFIERNLNDTRYVARFLCNHIADNMLLTGKGKRKVFASNGQITALLRGCWGLQKVRENNDRHHALDAVVVACSTKSMQDKITKFVKYKEGRLFKDKKDGVYKGERINRETGEIISLHFPTPWKFFKENVEIRIFSENPKLELENRLPDYPQYNHEFVQPLFVSRMPTRKMTGQGHMETVKSAKRLDKGLSVLKVPLTQLKLSDLERMVNREREMALYEALKECLEQFGNDPAKAFAEPFYKKGGALVKAVRVEQTQKSGVLVRNGNGVADNATGSIVRVDVFTKGGKYFLVPIYTWQVAKGILPNKAVIQGKDESEWEEMDENAVFQFSMHKNDLIKVKTKKGEIFGYFNGLDRATGSIEIEEHDLEKSKGKNGSHRGLGVKTAFFLEKYQVDELGKNIRPCRPTKRQHVR

SEQ ID NO: 40 - protein, 1054 aa, Actinobacillus suis
MKLTPLNYILGLDLGIASVGWAVVEIDEQENPLGLIDVGVRTFDRAEVPKTGESLALARRLARSARRLVKRRADRIKKAKRLLKAENILLSADEHLPNDVWQLRVKGLDQKLERQEWAAVLLHLLKHRGYLSQRKNESKSENKELGALLSGVETNHQILQSAEYRTPAEIAVKKFHVEDGHIRNQRGAYTHTFSRLDLLAEMELLFQRQTDLGNPHTSAKLLENLTALLMWQKPALAGEAILKMLGKCTFEPTEYKAAKNSYSAERFVWLTKLNNLRILEQGAERALTDNERFALLDQPYEKAKFTYAQARTMLALPDEAIFKGVRYQGEDKKAVETKTILMEMKAYHQIRKALENADLKAEWNELKNNSELLDDIGTAFSLHKTDEDICRYLDGKLSESILNALLENLNFDKFIQLSLKALQQILPLMLQGQRYDEAVSAIYGDHYGKKSAEINRLLPTIPADEIRNPVVLRTLTQARKVINAVVRLYGSPARIHIETGREVGKSYQDRKKLEKQQEDNRKQRESAVKKFKEYFPNFVGEPKGKDILKMRLYELQQAKCLYSGKSLELHRLLEKGYVEVDHALPFSRTWDDSFNNKVLVLANENQNKGNLTPYEWLDGKNNSEHWQNFVARVQTSGFSHTKKQRILSHKLDEKGFIERNLNDTRYVARFLCNFIADNMLLTGKGKRKVFASNGQITALLRGRWGLQKVRDDNDRHHALDAVVVACSTVVMQQKITRFVRYEEGNVFSGERIDRETGEIIPLHFPSPWAFFRENVEIRIFSENPKLELENRLPDYPQYNHEFVQPLFVSRMPTRKMTGQGHMETVKSAKRLDEGLSVLKVPLTQLKLSDLERMVNREREVTLYESLKARLEQFGNDPAKAFAEPFHKKGGAVVKAVRVEQTQKSGVLVRDGNGVADNASMVRVDVFTKGGKYFLVPIYTWQVAKGILPNKAVTANVDEIDWLEMDESYQFIFTMYPNDLVKVKLKKEEFFGYYGGLDRATGAIVIKEHDLEKSKGKQGIYRIGVKLALSFEKYQVDELGKNIRPCRPTKRQHVR

SEQ ID NO: 41 - protein, 1105 aa, Actinomyces coleocanis DSM 15436
MDNKNYRIGIDVGLNSIGFCAVEVDQHDTPLGFLNLSVYRHDAGIDPNGKKTNTTRLAMSGVARRTRRLFRKRKRRLAALDRFIEAQGWTLPDHADYKDPYTPWLVRAELAQTPIRDENDLHEKLAIAVRHIARHRGWRSPWVPVRSLHVEQPPSDQYLALKERVEAKTLLQMPEGATPAEMVVALDLSVDVNLRPKNREKTDTRPENKKPGFLGGKLMQSDNANELRKIAKIQGLDDALLRELIELVFAADSPKGASGELVGYDVLPGQHGKRRAEKAHPAFQRYRIASIVSNLRIRHLGSGADERLDVETQKRVFEYLLNAKPTADITWSDVAEEIGVERNLLMGTATQTADGERASAKPPVDVTNVAFATCKIKPLKEWWLNADYEARCVMVSALSHAEKLTEGTAAEVEVAEFLQNLSDEDNEKLDSFSLPIGRAAYSVDSLERLTKRMIENGEDLFEARVNEFGVSEDWRPPAEPIGARVGNPAVDRVLKAVNRYLMAAEAEWGAPLSVNIEHVREGFISKRQAVEIDRENQKRYQRNQAVRSQIADHINATSGVRGSDVTRYLAIQRQNGECLYCGTAITFVNSEMDHIVPRAGLGSTNTRDNLVATCERCNKSKSNKPFAVWAAECGIPGVSVAEALKRVDFWIADGFASSKEHRELQKGVKDRLKRKVSDPEIDNRSMESVAWMARELAHRVQYYFDEKHTGTKVRVFRGSLTSAARKASGFESRVNFIGGNGKTRLDRRHHAMDAATVAMLRNSVAKTLVLRGNIRASERAIGAAETWKSFRGENVADRQIFESWSENMRVLVEKFNLALYNDEVSIFSSLRLQLGNGKAHDDTITKLQMHKVGDAWSLTEIDRASTPALWCALTRQPDFTWKDGLPANEDRTIIVNGTHYGPLDKVGIFGKAAASLLVRGGSVDIGSAIHHARIYRIAGKKPTYGMVRVFAPDLLRYRNEDLFNVELPPQSVSMRYAEPKVREAIREGKAEYLGWLVVGDELLLDLSSETSGQIAELQQDFPGTTHWTVAGFFSPSRLRLRPVYLAQEGLGEDVSEGSKSIIAGQGWRPAVNKVFGSAMPEVIRRDGLGRKRRFSYSGLPVSWQG

SEQ ID NO: 42 - protein, 1113 aa, Actinomyces georgiae F0490
MSASSQNVERIRYKVGIDVGLRSIGFCAVQVDADDRPVKLLNTVVHVHDAGVSPADAKKADTRKLVSGVARRTRRLYRTRKRRLVDLDRQLDGLGWPLVDPARFADPREPWFAREKLVSGRVDDADERKELLSVALRHIAHHRGWRNPYSTVESLQADAPPSEFLQGLNQRVSEKLGTELDPGLTQGQLVAKLLHRFPNAKIRGPEGILRGKLHQSDNAGELRLICRTQGLDCHITEELVRLVFQAKSPKANKEMRKRIGRDQLPGQGAHIRAEKAHPVFQRFRIVAVLANLRIREAHVDRRLTAEEMRTLTDFLLGLAGSEQPTWEELADNLNIERHQLRGTAKASVDGAPALRFPPIDATTDRIYASKLKWLAEWWRQADEERRGYMVDALSNSGGSEDEPYLDDEIAEMLEQASEEDQAKLDSLHLPGGRASYCLDTLRRLTDAMLGGGLDLFEARKAVFHVDDDWAPPTDPIGAPVGNPPVDRVLKHVARWLEAATGRWGAPQTINIEHVREGLGSEKAARELTRMNDRRRRNNQKLVEEMGEKLGMSGRIRRSDRMRYEAIRRQNCECLYCGQPITYQTMEMDHIVPRAGAASTNSRSNLAAVCRRCNHQKGKLPFAVWAESQDSPAEVRLQDAVQRVRHWLRDAGMGQKELQALRVQVIARLKSKRPDEEFDGRSMESIAWMANELRARVEAQYRGSGTTVRVYRGALTAEARKASGFEGRVNLIGGRGKDRFDRRHHAMDALVIALMNQSVAQTLALRLNMRDSQWLTQSEQTWRQFHGAPGEAARKWEAWDRDMRDASDLFNLALDGGRIPITENVRLRVGNGRVHEDGVIRFKPEYEVKGKTIKGGEARLLGDSLPSEQIDRAETPALWTALTRLPEYDRKSGLPENPDRVIRVNGAVVQATDRIRFFGTPASVAVRGGYAKLGESIHHARIYRINGKTPKYAMIRVYTIDLMRLNHEDIFTAVLKPSTISMRCAEKKLKYAIAEGNAEQIGWLVEGDQLELDAAAYAKGVGADLMREYPMATCWRVAGFPDEAKLRLRPVLLAAEGMGEDAPKFMREVLENQGWRPAVNALLSPGSVRVVRRNVLGEPRFKSSGHLPTTVDLV

SEQ ID NO: 43 - protein, 1101 aa, Actinomyces naeslundii str. Howell 279
MWYASLMSAHHLRVGIDVGTHSVGLATLRVDDHGTPIELLSALSHIHDSGVGKEGKKDHDTRKKLSGIARRARRLLHHRRTQLQQLDEVLRDLGFPIPTPGEFLDLNEQTDPYRVWRVRARLVEEKLPEELRGPAISMAVRHIARHRGWRNPYSKVESLLSPAEESPFMKALRERILATTGEVLDDGITPGQAMAQVALTHNISMRGPEGILGKLHQSDNANEIRKICARQGVSPDVCKQLLRAVFKADSPRGSAVSRVAPDPLPGQGSFRRAPKCDPEFQRFRIISIVANLRISETKGENRPLTADERRHVVTFLTEDSQADLTWVDVAEKLGVHRRDLRGTAVHTDDGERSAARPPIDATDRIMRQTKISSLKTWWEEADSEQRGAMIRYLYEDPTDSECAEIIAELPEEDQAKLDSLHLPAGRAAYSRESLTALSDHMLATTDDLHEARKRLFGVDDSWAPPAEAINAPVGNPSVDRTLKIVGRYLSAVESMWGTPEVIHVEHVRDGFTSERMADERDKANRRRYNDNQEAMKKIQRDYGKEGYISRGDIVRLDALELQGCACLYCGTTIGYHTCQLDHIVPQAGPGSNNRRGNLVAVCERCNRSKSNTPFAVWAQKCGIPHVGVKEAIGRVRGWRKQTPNTSSEDLTRLKKEVIARLRRTQEDPEIDERSMESVAWMANELHHRIAAAYPETTVMVYRGSITAAARKAAGIDSRINLIGEKGRKDRIDRRHHAVDASVVALMEASVAKTLAERSSLRGEQRLTGKEQTWKQYTGSTVGAREHFEMWRGHMLHLTELFNERLAEDKVYVTQNIRLRLSDGNAHTVNPSKLVSHRLGDGLTVQQIDRACTPALWCALTREKDFDEKNGLPAREDRAIRVHGHEIKSSDYIQVFSKRKKTDSDRDETPFGAIAVRGGFVEIGPSIHHARIYRVEGKKPVYAMLRVFTHDLLSQRHGDLFSAVIPPQSISMRCAEPKLRKAITTGNATYLGWVVVGDELEINVDSFTKYAIGRFLEDFPNTTRWRICGYDTNSKLTLKPIVLAAEGLENPSSAVNEIVELKGWRVAINVLTKVHPTVVRRDALGRPRYSSRSNLPTSWTIE

SEQ ID NO: 44 - protein, 1144 aa, Actinomyces sp. ICM47
MSMIDSSENVPGIRYRVGIDVGLKSIGFCAVEVDRNDQPVRMLNSMVFIHDAGVDPNENKAAKSRKLTAGVARRTRRLYRTRHQRLVNLDRVLSKEFGWPLPDLTSFKDPREPWHVRAGLLEGYIADDEKRKEALSIALRHIARHRGWRNPYAKVETLLQPSEPSDFLKGLNDRISEELGRAFPADATPGQLVDTYLAHPDYVGRAGTPKLRGPQGILAGKLHQSDNAQEIRGICDVQRIEPAERDRLIRVVFEAKSPKGSAKERGLVGYDELPGQGRHVRAEKAHPAFQLFRMVSVLANLRIREGREERPLTPDELEDLVDFINQVSLKQEVTWQDLADKLRIERADLRGTAKASFDGSPVLRNPPTDVTTEKIMACKVKWLKEWWKEADDEQRGYMVDAFSNSGGSEDGTDVNDEVAELLEQATEDDQLEFEKISLPQGRAAYSLDSLRRLTDRMLRDGVDLHTARRLEFNVGDDWKPAVEPIGAPTGNPAVDRVLKQVSRWLHAATERWGEPTVINIEHARDGLGSERVARELMRENEKRRKANASAVAEMAAKLKLSGKVHRSDQIRYFALQRQNCQCLYCGAPITYTTAEMDHIVPRADGSSTNDRSNLAAVCRTCNHMKGKIPFAVWASSDKANQGVSLTGALERVNMWQRDSGMSPRQLKQLQREVCARLKSKKPDQEFDGRSMESVAWMAVELRTRIEGFYRSRDEESVPSVGVYRGQLTAEARRASGFESRVNLIGGRGKTRFDRRHHAMDALVIALMNPSVSRTLALRLNMRDAQRLTGVEETWKHFYGKPGEASKRFESWRESMLRGVELFNIALSDNAIPFVENIRLRVGSSVIHDATVHSFCPPKTPDGKQIITKGYGEQHSLGSAMPVELIDRAETPALWTALTRCPDFDPKKGLPENPQRTISVNGTRVGPTELVNFFEFSKSGPKACLKVRGGYVDLSGAIHHARIYRIAGKKTAYAMIRVFQVDLLRLKDHDVFTTPLKPSTISMRTAEPKIREALANGTATQIGWLVEGDELVIDTSKYSGGFIGEVLARYPEATSWRVAGFMTPAKLRIKPILLSKEGFVDETQAALLGVEVTSEAIQKTVDRPGWLPAVNVLFGAGGVRVIRRNCLGEERYHSSASLPVSMTLE

SEQ ID NO: 45 - protein, 1095 aa, Actinomyces sp. oral taxon 175 str. F0384
MPAHHLRVGIDVGTHSVGLATLRVDDQGTPIELLSALSHIHDSGIGKEGQKDHDTRKKLSGVARRTRHLLRNRRERLQQLDKVLVDLGFPIPKPEEYPDLSERTDPYRVWRVRARLVEETLPEELRGPAISMAVRHIARHRGWRNPYSKVESLLSPAEESSFMKALRKRIMTKTGEVLDDDITPGQAMAQVALTHKIYMRGPEGILGKLHQSDNANEIRKICARQGISSDVCKQLLRAVFKAESPRGSAVSRVAPDPLPGQGSFRRAPKCDPEFQRFRIISIVANLRISETKGENRPLTVDERRQVVAFLMEDSQADLTWVDVAEKLRVSRQALRGTAMLTADGERSAAQPPIDVTDQIMRKTKISALKTWWDKADAERRGAMVRYLYEGLEDSECAEVIAKLPEKDHAKLDSLHLPAGRAAYSRESLTALSDHMLETTNDLHEARKRLFGVDDSWAPPAEPVGAPVGNPSVDRTLKIVARYLSAVESIWGTPEVIHVEHVRDGFTSERTAEERDKANRSRHNDNQKAIEKIQHDYGKEGYISRGDIVRFHALKLQGSACLYCGTTIGYHTCQLDHIVPQAGPGSNNRRGNLVAVCERCNHSKSNTPFAVWAQKCGIPHVGVKEAISRVNGWVEHNHSTSSGDLTRLKKEVIARLRRTQKDPEIDERSMESVAWMANELHHRIAAAYPETTVMVYRGSITAAARKAASIESRINLIGEKGRKDRLDRRHHAVDASVVALMEPSVAKTLAERSSLRGEQRLTGQEQTWKQYTGLTVGARERFEAWRGHMHRLTELFNESLAADEVYVTQNIRLRLSDGSAHTVKASKLVSHRLGDGLTVQQIDRACTPALWCALTREIDFDEKNGLPAREDRVIRVHGQEISSADCIQVFSKRKKTKSDRDEAPFGAIAVRGGFVEIGSSIHHARIYRIEGEKPAYAMLRVFTHDLLSQRHGDLFSAVIPPQSISMRCAATELRQAISEGRATYLGWIVSGDELHIPVETFTTHKIGSFLKDYPNTTRWRICGYDSETMLILKPRILSAEGLNNSSDIAEYVIKNKGWRVAINKLAKVHPTVVRRDALGRPRHSSRSNLPVTWSIE

SEQ ID NO: 46 - protein, 1181 aa, Actinomyces sp. oral taxon 180 str. F0310
MLHCIAVIRVPPSEEPGFFETHADSCALCHHGCMTYAANDKAIRYRVGIDVGLRSIGFCAVEVDDEDHPIRILNSVVHVHDAGTGGPGETESLRKRSGVAARARRRGRAEKQRLKKLDVLLEELGWGVSSNELLDSHAPWHIRKRLVSEYIEDETERRQCLSVAMAHIARHRGWRNSFSKVDTLLLEQAPSDRMQGLKERVEDRTGLQFSEEVTQGELVATLLEHDGDVTIRGFVRKGGKATKVHGVLEGKYMQSDLVAELRQICRTQRVSETTFEKLVLSIFHSKEPAPSAARQRERVGLDELQLALDPAAKQPRAERAHPAFQKFKVVATLANMRIREQSAGERSLTSEELNRVARYLLNHTESESPTWDDVARKLEVPRHRLRGSSRASLETGGGLTYPPVDDTTVRVMSAEVDWLADWWDCANDESRGHMIDAISNGCGSEPDDVEDEEVNELISSATAEDMLKLELLAKKLPSGRVAYSLKTLREVTAAILETGDDLSQAITRLYGVDPGWVPTPAPIEAPVGNPSVDRVLKQVARWLKFASKRWGVPQTVNIEHTREGLKSASLLEEERERWERFEARREIRQKEMYKRLGISGPFRRSDQVRYEILDLQDCACLYCGNEINFQTFEVDHIIPRVDASSDSRRTNLAAVCHSCNSAKGGLAFGQWVKRGDCPSGVSLENAIKRVRSWSKDRLGLTEKAMGKRKSEVISRLKTEMPYEEFDGRSMESVAWMAIELKKRIEGYFNSDRPEGCAAVQVNAYSGRLTACARRAAHVDKRVRLIRLKGDDGHHKNRFDRRNHAMDALVIALMTPAIARTIAVREDRREAQQLTRAFESWKNFLGSEERMQDRWESWIGDVEYACDRLNELIDADKIPVTENLRLRNSGKLHADQPESLKKARRGSKRPRPQRYVLGDALPADVINRVTDPGLWTALVRAPGFDSQLGLPADLNRGLKLRGKRISADFPIDYFPTDSPALAVQGGYVGLEFHHARLYRIIGPKEKVKYALLRVCAIDLCGIDCDDLFEVELKPSSISMRTADAKLKEAMGNGSAKQIGWLVLGDEIQIDPTKFPKQSIGKFLKECGPVSSWRVSALDTPSKITLKPRLLSNEPLLKTSRVGGHESDLVVAECVEKIMKKTGWVVEINALCQSGLIRVIRRNALGEVRTSPKSGLPISLNLR

SEQ ID NO: 47 - protein, 1103 aa, Actinomyces sp. oral taxon 181 str. F0379
MTKINDDLRYRVGIDVGLKSIGFCAVEVDENDQPLRLLNSMVFVHDAGVDPNENKAAKSRKLTAGVARRTQRGTAQNRRRLAELDRALSEELNWPLPNLEDFEDSYEPWHTRAELVEHYIKDDAERAEALAIAIRHIARHRGWRNPYLSVDSLLTPQEPSKFLRGLNERVTQALGREFPADATPGQLICAYIDSPKYAETQGIRGDSGILSGKLHQFDNVGEIRKICEVQRLDHDVFKLLVRKVFFAKSPRGSAAGLVGHDQIPGQGKYIRAEKAHPDFQLFRIVAVLTNLRIREGKAERCLTPDELRGLVDYILEVQLKQQVTWADLADNLGIERTDLRGTARASFDGSPALRFPPTDVTAEKIMASKVKWLKDWWDKADSERRGFMVDALSNSGGSTGDNDIDDEVAALLEAATEDEQAELEKIQLPQGRAAYSLDSLRRLTKRMLEEGVDLHTARKEEFNVDDDWRPEPEPIEAPVGNPAVDRVLKQVARWLNMATDRWGVPDVINIEHTRDGLGSEKVARELLRESQKRQDLNQKDMDKMIRELGISGKARRSSLIKYQAIQRQNSMCLYCGTEIGFETAEMDHIVPRALSGSTNDRSNLAAVCRACNHQKGAVPFAVWATSGEAHAGVSLEDAIKRVRLWQKGPGMSPKQHKAFQNEVISRLKSRKPDEEFDGRSMESVAWMAVELRTRIDGYYRKVNSDSVPKVGIYRGQLTAEARKASGFENRVNLIGGKGKTRFDRRHHAMDALVIAMMNQSVSQTLALRVNMRESQRITGQEETWKNFYGKPGQASERFEKWREGMLRAVELFNIELAKNAIPFHENVRLRVGSSKVHDDTVRKFIHAKLGEALSVAMIDCAETPALWTALTRLPDFDPKDGLPEDLSREIYIHSRKITADEQLNFFNSPSACLKVRGGYVEIGSSIHHARVYRIDGKKTTYSMVRVFATDLVKMTHEDVFTTPLKPSTISMRTADPKIRKALADGTATQIGWLVEGDELQLETDKYSGGLIGEVLAEYPQLTSWRVAGFYGVTQLRLRPYMLAAEGIPSDASESLRKVIEGKGWLPAINALLSSGCVKVVRRNCLGEPRFNAKSSLPVSQLLR

SEQ ID NO: 48 - protein, 1120 aa, Actinomyces sp. oral taxon 848 str. F0332
MNAMKQYNAGIDVGINSVGFAAIEVDSKGLPLNILNNMVVLHDSGVDPGTAKTGATRLANSGTARRTRKLIARRRKRLQKLDRYIEVQGWPLVDFSSLPDPYTPWKIRAKLTQDRLEGEEQGRGLSIALRHMARHRGWRNPYEGVESLHSPKEASKQFKDLKDRVTKVSGVIFDEDATPAEVVCDIGLSPKQRLRSAPSAKYKEGATLADEPVGGKSKEGLLGGKLMQSDNANELRKIGIVQGLSNEKVNEIIDQVFASESPKGQAGKRAKKDELPGQEQYVRALRAHLAFQRFRIVAAVANLRILEAEPKHERLLSQSEKDKVIEFLMSADGDDGVTWSDVAEELGIERECLSGTAKRGADGERPSSFPPTNSTNISIVRSKVKPLIEWWRKASDDEQATLVTALSNADELTDDQPSAETVRQFLSSPDEQSQEKIDKISLPKGRAAYSVNSLERLTRRMLKDSVDLFEARKREFGVDNNWTPTPDSIGEPVGNPAVDRVLKIVNRWLLAVTRKWGPPKVVNIEHVRVGFTSAAQTRKYEEENKTNRERNLAILEELRDKFGTSGKIRREDITRFAALRRQNCQCAYCGEAITFFDCEMDHIVPRKGPGSTNTRNNLVAICERCNKSKSNMPFSLWAQNCDIPGVSVEAVIDRVRTWIKDPELNPKQYNNFKKDVIERLRKTVDDDAIDNRSIESVAWMATELADRIGSHFRTAGANTKVRVYRGWLTSEARKASGFEGKINLIGGRGKTRLDRRHHAMDAATIALMRQSVAQTLVERASIRESDRLRRVVSSSWKDYRGADRDKQFSYGSWLNSMNALAELFNRAIDADGIPVTQNLRLRLGNGEAHDATIRSLEKKRVGASWTIGEIDRASTPQLWLALTRQEDFDQNDGLPANASRELRVKNHWFHAEENVTLFPTKSAAIAVRGGYAEIGNTIHHARLYKLPGKKLTYGMIRVFAIDLLCAWHTDLFSSPLLPESISLRTAETKVRRAVEDGAAMYIGWLVDGDEIVLDPETKAFKSNKIGEYLCEFPGTKRWKVDGFPDKEKLRLRPLQLAGEGLPEDVSAGTEEILGPKGNGWRVAINALFKSSQLVVVRRTALGMVRKLSRRHLPLTTRLRG

SEQ ID NO: 49 - protein, 1114 aa, Actinomyces turicensis ACS-279-V-Col4
MQFHFYMVYVTMKGMNDKDASQQLRYRVGIDVGTHSIGFCAVEVDESGMPIQLLNSMVHKHDSGIDPGGNDTATTRLAEAGVARRTRRLIRRRKKRLQELDAFIEECGWPLVDLATITDARSPWRIRAHLATEHIDDEAEQGKLLSIALRHMARHRGWRSPYARISSLHIQADPSEQLKALAQRVSEKTGISLTADQTPAQLISVYLDVFETGKLRGPEGILGGKLMQSDNANELRRIATVQGLDNDLLKKIIGFVFAAESPKGSAAKRVGKDVLPGAHGLRAEKAHPAFQQFRIVSIVQNLRIKEGTGLRALTSEETEIVVDFLNQAGLTEAPTWEEVADNLEIPRSHLKGTATEGFDGIAPSTRPPFDVTSQKILNGKLKKLSAWWKDADYDHRCAMVNALSNVGSDDEGSLADDDVREFLSDFTDEELEALDKVELPGGRAAYSVDSLEKLTNTMLSEGCDLHSARKIAFGVDDSWTPPAEPIGQPVGNPAVDRVLKQVARWISAATNQWGTPESVNIEHVRDALGSEKASREYQRSLQTRRIRNEKLFAEMRERLDIGGKPRRSELTRYLALQRQNCQCLYCGMPITYTDAEMDHIVPRKGAASTNTRENFAAVCRACNHQKSNLPFAVWAEKTERPGVSVKEAYKRVSDMRIEPGMNGRQMNEFRKAIRLRLTTKHADAEIDGRSLESVAWMANELRHRIEGFYRSAENDVTVRVFRGAVTAEGRRASGFESRVNLIGGKGKTRLDRRHHAMDALTIALMEPGIAQTIALRMNMRESQRVLGEQETWKSFTGGSDTARKRWEHWCEEMLRASELFNVFLAEDRIPICQNKRLRLGSSAVHKAIVQPFEASDKRIVSDAMPVELIDRASTPALWTALTRDPDFDPKEGLPANPSRTIRLHDKRLGPNETVEFFPTAAACLAIRGGYCEIGAGIHHARIFRISGKKTTYAMLRVYQCDLVRFQKENLLTVELPANTISVRTAVPKLREALAHGTAEQIGWLVVGDELKIDLSGFTTGQIETFNETYPQATRWEVTGFPTKTQLRLKPLLIASEGLADDVPDDIVKIVKGPGWWPAIDKLLKIGNVVLYRRDTHGKPRVVSHRSLPLSSKLQ

SEQ ID NO: 50 - protein, 1101 aa, Akkermansia muciniphila
MSRSLTFSFDIGYASIGWAVIASASHDDADPSVCGCGTVLFPKDDCQAFKRREYRRLRRNIRSRRVRIERIGRLLVQAQIITPEMKETSGHPAPFYLASEALKGHRTLAPIELWHVLRWYAHNRGYDNNASWSNSLSEDGGNGEDTERVKHAQDLMDKHGTATMAETICRELKLEEGKADAPMEVSTPAYKNLNTAFPRLIVEKEVRRILELSAPLIPGLTAEIIELIAQHHPLTTEQRGVLLQHGIKLARRYRGSLLFGQLIPRFDNRIISRCPVTWAQVYEAELKKGNSEQSARERAEKLSKVPTANCPEFYEYRMARILCNIRADGEPLSAEIRRELMNQARQEGKLTKASLEKAISSRLGKETETNVSNYFTLHPDSEEALYLNPAVEVLQRSGIGQILSPSVYRIAANRLRRGKSVTPNYLLNLLKSRGESGEALEKKIEKESKKKEADYADTPLKPKYATGRAPYARTVLKKVVEEILDGEDPTRPARGEAHPDGELKAHDGCLYCLLDTDSSVNQHQKERRLDTMTNNHLVRHRMLILDRLLKDLIQDFADGQKDRISRVCVEVGKELTTFSAMDSKKIQRELTLRQKSHTDAVNRLKRKLPGKALSANLIRKCRIAMDMNWTCPFTGATYGDHELENLELEHIVPHSFRQSNALSSLVLTWPGVNRMKGQRTGYDFVEQEQENPVPDKPNLHICSLNNYRELVEKLDDKKGHEDDRRRKKKRKALLMVRGLSHKHQSQNHEAMKEIGMTEGMMTQSSHLMKLACKSIKTSLPDAHIDMIPGAVTAEVRKAWDVFGVFKELCPEAADPDSGKILKENLRSLTHLHHALDACVLGLIPYIIPAHHNGLLRRVLAMRRIPEKLIPQVRPVANQRHYVLNDDGRMMLRDLSASLKENIREQLMEQRVIQHVPADMGGALLKETMQRVLSVDGSGEDAMVSLSKKKDGKKEKNQVKASKLVGVFPEGPSKLKALKAAIEIDGNYGVALDPKPVVIRHIKVFKRIMALKEQNGGKPVRILKKGMLIHLTSSKDPKHAGVWRIESIQDSKGGVKLDLQRAHCAVPKNKTHECNWREVDLISLLKKYQMKRYPTSYTGTPR

SEQ ID NO: 51 - protein, 1113 aa, Alcanivorax pacificus W11-5
MRYRVGLDLGTASVGAAVFSMDEQGNPMELIWHYERLFSEPLVPDMGQLKPKKAARRLARQQRRQIDRRASRLRRIAIVSRRLGIAPGRNDSGVHGNDVPTLRAMAVNERIELGQLRAVLLRMGKKRGYGGTFKAVRKVGEAGEVASGASRLEEEMVALASVQNKDSVTVGEYLAARVEHGLPSKLKVAANNEYYAPEYALFRQYLGLPAIKGRPDCLPNMYALRHQIEHEFERIWATQSQFHDVMKDHGVKEEIRNAIFFQRPLKSPADKVGRCSLQTNLPRAPRAQIAAQNFRIEKQMADLRWGMGRRAEMLNDHQKAVIRELLNQQKELSFRKIYKELERAGCPGPEGKGLNMDRAALGGRDDLSGNTTLAAWRKLGLEDRWQELDEVTQIQVINFLADLGSPEQLDTDDWSCRFMGKNGRPRNFSDEFVAFMNELRMTDGFDRLSKMGFEGGRSSYSIKALKALTEWMIAPHWRETPETHRVDEEAAIRECYPESLATPAQGGRQSKLEPPPLTGNEVVDVALRQVRHTINMMIDDLGSVPAQIVVEMAREMKGGVTRRNDIEKQNKRFASERKKAAQSIEENGKTPTPARILRYQLWIEQGHQCPYCESNISLEQALSGAYTNFEHILPRTLTQIGRKRSELVLAHRECNDEKGNRTPYQAFGHDDRRWRIVEQRANALPKKSSRKTRLLLLKDFEGEALTDESIDEFADRQLHESSWLAKVTTQWLSSLGSDVYVSRGSLTAELRRRWGLDTVIPQVRFESGMPVVDEEGAEITPEEFEKFRLQWEGHRVTREMRTDRRPDKRIDHRHHLVDAIVTALTSRSLYQQYAKAWKVADEKQRHGRVDVKVELPMPILTIRDIALEAVRSVRISHKPDRYPDGRFFEATAYGIAQRLDERSGEKVDWLVSRKSLTDLAPEKKSIDVDKVRANISRIVGEAIRLHISNIFEKRVSKGMTPQQALREPIEFQGNILRKVRCFYSKADDCVRIEHSSRRGHHYKMLLNDGFAYMEVPCKEGILYGVPNLVRPSEAVGIKRAPESGDFIRFYKGDTVKNIKTGRVYTIKQILGDGGGKLILTPVTETKPADLLSAKWGRLKVGGRNIHLLRLCAE

SEQ ID NO: 52 - protein, 1029 aa, Alicycliphilus denitrificans BC
MRSLRYRLALDLGSTSLGWALFRLDACNRPTAVIKAGVRIFSDGRNPKDGSSLAVTRRAARAMRRRRDRLLKRKTRMQAKLVEHGFFPADAGKRKALEQLNPYALRAKGLQEALLPGEFARALFHINQRRGFKSNRKTDKKDNDSGVLKKAIGQLRQQMAEQGSRTVGEYLWTRLQQGQGVRARYREKPYTTEEGKKRIDKSYDLYIDRAMIEQEFDALWAAQAAFNPTLFHEAARADLKDTLLHQRPLRPVKPGRCTLLPEEERAPLALPSTQRFRIHQEVNHLRLLDENLREVALTLAQRDAVVTALETKAKLSFEQIRKLLKLSGSVQFNLEDAKRTELKGNATSAALARKELFGAAWSGFDEALQDEIVWQLVTEEGEGALIAWLQTHTGVDEARAQAIVDVSLPEGYGNLSRKALARIVPALRAAVITYDKAVQAAGFDHHSQLGFEYDASEVEDLVHPETGEIRSVFKQLPYYGKALQRHVAFGSGKPEDPDEKRYGKIANPTVHIGLNQVRMVVNALIRRYGRPTEVVIELARDLKQSREQKVEAQRRQADNQRRNARIRRSIAEVLGIGEERVRGSDIQKWICWEELSFDAADRRCPYSGVQISAAMLLSDEVEVEHILPFSKTLDDSLNNRTVAMRQANRIKRNRTPWDARAEFEAQGWSYEDILQRAERMPLRKRYRFAPDGYERWLGDDKDFLARALNDTRYLSRVAAEYLRLVCPGTRVIPGQLTALLRGKFGLNDVLGLDGEKNRNDHRHHAVDACVIGVTDQGLMQRFATASAQARGDGLTRLVDGMPMPWPTYRDHVERAVRHIWVSHRPDHGFEGAMMEETSYGIRKDGSIKQRRKADGSAGREISNLIRIHEATQPLRHGVSADGQPLAYKGYVGGSNYCIEITVNDKGKWEGEVISTFRAYGVVRAGGMGRLRNPHEGQNGRKLIMRLVIGDSVRLEVDGAERTMRIVKISGSNGQIFMAPIHEANVDARNTDKQDAFTYTSKYAGSLQKAKTRRVTISPIGEVRDPGFKG

SEQ ID NO: 53 - protein, 1029 aa, Alicycliphilus; identical to SEQ ID NO: 52

SEQ ID NO: 54 - protein, 1146 aa, Alicyclobacillus hesperidum URH17-3-68
MAYRLGLDIGITSVGWAVVALEKDESGLKPVRIQDLGVRIFDKAEDSKTGASLALPRREARSARRRTRRRRHRLWRVKRLLEQHGILSMEQIEALYAQRTSSPDVYALRVAGLDRCLIAEEIARVLIHIAHRRGFQSNRKSEIKDSDAGKLLKAVQENENLMQSKGYRTVAEMLVSEATKTDAEGKLVHGKKHGYVSNVRNKAGEYRHTVSRQAIVDEVRKIFAAQRALGNDVMSEELEDSYLKILCSQRNFDDGPGGDSPYGHGSVSPDGVRQSIYERMVGSCTFETGEKRAPRSSYSFERFQLLTKVVNLRIYRQQEDGGRYPCELTQTERARVIDCAYEQTKITYGKLRKLLDMKDTESFAGLTYGLNRSRNKTEDTVFVEMKFYHEVRKALQRAGVFIQDLSIETLDQIGWILSVWKSDDNRRKKLSTLGLSDNVIEELLPLNGSKFGHLSLKAIRKILPFLEDGYSYDVACELAGYQFQGKTEYVKQRLLPPLGEGEVTNPVVRRALSQAIKVVNAVIRKHGSPESIHIELARELSKNLDERRKIEKAQKENQKNNEQIKDEIREILGSAHVTGRDIVKYKLFKQQQEFCMYSGEKLDVTRLFEPGYAEVDHIIPYGISFDDSYDNKVLVKTEQNRQKGNRTPLEYLRDKPEQKAKFIALVESIPLSQKKKNHLLMDKRAIDLEQEGFRERNLSDTRYITRALMNHIQAWLLFDETASTRSKRVVCVNGAVTAYMRARWGLTKDRDAGDKHHAADAVVVACIGDSLIQRVTKYDKFKRNALADRNRYVQQVSKSEGITQYVDKETGEVFTWESFDERKFLPNEPLEPWPFFRDELLARLSDDPSKNIRAIGLLTYSETEQIDPIFVSRMPTRKVTGAAHKETIRSPRIVKVDDNKGTEIQVVVSKVALTELKLTKDGEIKDYFRPEDDPRLYNTLRERLVQFGGDAKAAFKEPVYKISKDGSVRTPVRKVKIQEKLTLGVPVHGGRGIAENGGMVRIDVFAKGGKYYFVPIYVADVLKRELPNRLATAHKPYSEWRVVDDSYQFKFSLYPNDAVMIKPSREVDITYKDRKEPVGCRIMYFVSANIASASISLRTHDNSGELEGLGIQGLEVFEKYVVGPLGDTHPVYKERRMPFRVERKMN

SEQ ID NO: 55 - protein, 1052 aa, Aminomonas paucivorans DSM 12260
MIGEHVRGGCLFDDHWTPNWGAFRLPNTVRTFTKAENPKDGSSLAEPRRQARGLRRRLRRKTQRLEDLRRLLAKEGVLSLSDLETLFRETPAKDPYQLRAEGLDRPLSFPEWVRVLYHITKHRGFQSNRRNPVEDGQERSRQEEEGKLLSGVGENERLLREGGYRTAGEMLARDPKFQDHRRNRAGDYSHTLSRSLLLEEARRLFQSQRTLGNPHASSNLEEAFLHLVAFQNPFASGEDIRNKAGHCSLEPDQIRAPRRSASAETFMLLQKTGNLRLIHRRTGEERPLTDKEREQIHLLAWKQEKVTHKTLRRHLEIPEEWLFTGLPYHRSGDKAEEKLFVHLAGIHEIRKALDKGPDPAVWDTLRSRRDLLDSIADTLTFYKNEDEILPRLESLGLSPENARALAPLSFSGTAHLSLSALGKLLPHLEEGKSYTQARADAGYAAPPPDRHPKLPPLEEADWRNPVVFRALTQTRKVVNALVRRYGPPWCIHLETARELSQPAKVRRRIETEQQANEKKKQQAEREFLDIVGTAPGPGDLLKMRLWREQGGFCPYCEEYLNPTRLAEPGYAEMDHILPYSRSLDNGWHNRVLVHGKDNRDKGNRTPFEAFGGDTARWDRLVAWVQASHLSAPKKRNLLREDFGEEAERELKDRNLTDTRFITKTAATLLRDRLTFHPEAPKDPVMTLNGRLTAFLRKQWGLHKNRKNGDLHHALDAAVLAVASRSFVYRLSSHNAAWGELPRGREAENGFSLPYPAFRSEVLARLCPTREEILLRLDQGGVGYDEAFRNGLRPVFVSRAPSRRLRGKAHMETLRSPKWKDHPEGPRTASRIPLKDLNLEKLERMVGKDRDRKLYEALRERLAAFGGNGKKAFVAPFRKPCRSGEGPLVRSLRIFDSGYSGVELRDGGEVYAVADHESMVRVDVYAKKNRFYLVPVYVADVARGIVKNRAIVAHKSEEEWDLVDGSFDFRFSLFPGDLVEIEKKDGAYLGYYKSCHRGDGRLLLDRHDRMPRESDCGTFYVSTRKDVLSMSKYQVDPLGEIRLVGSEKPPFVL

SEQ ID NO: 56 - protein, 1361 aa, Anaerococcus tetradius ATCC 35098
MGNYYLGLDIGTNSVGWAVTDENYNIERFKKKNMWGIRLFDEAKTAESRRIHRQARRMRQRKIQRLNLLMELFDVEISKVDESFFIRKKESDLHYEDKSQDSRYALFNDKEFNDKDYHNKYPTIFHLIMDLIENDEKKDIRLLYLACHYLIKNRGHFIFEGQKFDVNSSLNNNINKLKSHLDQFYNICLDFDNDKLIEILVNQNLNISEKSKKIKELLRKTNLEVGIANLIAGGSIKLSNMFDDDELKNLDYNSLSFKNSNFDEGRELFEEVLEDRFELVEILKDIHDASVLETMLSSASISPDGGKYISSSMINSYNKHKRDLKLLKKIIKKYKKSEYDNIFRDENIKNNYLSYTRTGINKNKKVQAEDNTDSDGFYKYIVKILKDIKENDSDEDIKYILSEIDKKNFVPKQRTKENSVIPYQLREIELRKIIDNQSKYHKFLNEVDEKGISVKEKIISLLTFRIPYYIGPLNPSYNEEKNFTTSWVKRLAKGKVTPWNFEDMVDIDASREAFIENKLNKCSFLLDETVLPKDSLLYQEYMVLNELNNLKINGQSINTDLKKSIYEELFKKYKKVTRKRLISYIKEKENMSGDIVITGIDGDFKQGLKSYIAFKDIIGEKIDDDIYRKEVEKIIRDISLYGDDKSFIQKKIKNENKLDLSDDQISKIAKLKFKDWGRFSKKLLVGIKASDKNTGEIDNIIGFMRNYNYNIMQLMANVFTFKDEIEKLNSKYYTDEKINIDYLDDLYLSSPAKRMLWQSFQIVDEIKNIKNSDPKKIFIEMARSKEDKPTRKMSRKSRLEKLYTDSKKQFIKLFGPDEYDKLNNEIKNKSESDFRWDNLYLYYTQFGRCMYSLDPIDLEELSNKNLYDQDHIYPKSKIYDDSIENRVLVKKQLNLDKSNEYPIPDRVLNKDKNKLLAFWKMLNEKELIGDKKYARLIRKSPFTDEELGDFIARQLVETRQATKETANMLKRLCPDSKIVYVKAKNVSDFRRKFDILKCRSINDLHHAHDAYLNIVVGNVFDTKFTSNPLNFIKNNSKNRSYNLEKIYDYDVIRNEKIAWLAERKEENQDGSIATVLKNLSKNDIRVTRRTYIKCEDLFDENIVRKGNGKFPIKENNNKSDTNKYGGYSGIKNAYFVLLEDEKHNRILEAIPSFIYKKEKNGEKGSVINYLQNILGIKSAKILRDKIKIGSLLKIDKFPYNLAGKSGNGILISGGVQLILDKNTSKYIKKIENYKYKLDENKDYQINIFDKLSKEENIKLFDLFVDKFENSIYKNRVNIKLKEIKLARPKFEHLSIEEQIKTLTQMLILFGRENNAVNLEYIGLPKNTGKTKINKKINNKDIKIINQSITGLYETEEDLANI

SEQ ID NO: 57 - protein, 1552 aa, Anaerophaga sp. HS1
MFSQRNNPYCELLQNVKQLYKEKFGKTNQVDNSIIYGFMKRILGLDLGTNSIGWALVENDENDRKGKIIGMGSRIIPMDMSELDNFNKGASISKTAERTRLRMTRRLRERHLLRRARLHRILNIMGFLPEHYRNSIDFIDKKGCFFEGQEPKIAYKPDKNSEQFCFLFTSSFHEMLEDFRKFQPELIQNRKKVPYDWTIYYLRKKALTQKISKEELAWIILNFNTKRGYYHLRGEDEDNQDNKKIKEFRALKVVNVTEREGANSSGKKWYDMELENGWVYSRQSNLPPNLEGKTIELIVSYTLDNNGNIKKDKNGKEKYSLSMPGEEDWNLVKIKTENDLKTSKKSVGEYIYDHLLKNPDQKIRGKLISTIERKFYKEELSRILKTQMNFYEELKNRELYQKCVEELYPNNKSHQQTLLQKDFIHLIVEDIIFYQRPLKSKRAFVNNCPLEYRVYVDKKSGELIKSGVKCIPKSHPLFQEFRLWQYVRNLRIYERERMVNGRLMVNVDVTNELLPDEEHIVRLFDLLNDRKSFKQDDVLRFVGIKSPKDRKRYSWNYPEDKELPGNETRHLILAWLKKVDGVPEDWLDPEKLKALWHLLYSVTDREEIIKGLHSFAKKYELPDTFVEHFKKIPRLEREYGSFSEKAIKKLLPLMRMGKYWKAEEIPADLLEKAQKIIDAEADDRISDEVREKLLHLKDISQLKGLPLWQASYLVYGRHSETGEVVKWRTSEDLEKYILQFKQHSLRNPVVEQVILEALRVVKDIWEHYGEGKEGFFNEIHVEIGRELKNPADKRKKITSQIQENENTNLRIKALLEELFNDPSVKNVRPYSPAQQEILRIYEDGVLNGQKEIPDDILKISKMARPSKSQLVKYKLWLEQKYRSPYTGEIIPLSQLFTSAYEIEHIIPQARYFDDSFSNKVICEAEVNREKGHQLAFEFITKRGGDEIELNFGKKVTILNVEEYQKFVKDHYGRSLRSLSKMRKLLMEDIPDDFIDRQLNDSRYISKVVRNLLSNIVRAEDENSLVSKHLITCTGGVTTRLKHEWGLNDVWNELITPRFVRLNKMGKEKFGEWINKKGKQVFQIQMPLELQKGFNKKRIDHRHHALDALVVACASRSHVNYLNNDSARANASETRYDLRNKLCYKDKTDSNGNYRWKFYKPWESFTEEAKNRLAGTVVSFKSNRRIMTRSSNRYFKWVDTSEGKKKKLVRQIKGDNQAIRKPLHKDTVLGKVSLRKEKKVSLSKAIDLWESIVDKPLKKRIQSLREQGYDKKLLLKYFKDRNNQFNGQDISRVNIYFFDNNLAARRVTLDASFNSEKRIDGITDSGIKKILYAHLQNEKYHGKKDEKGNEISPYELAFSPEGLEEMNANIKKLNGGKPHCPIYKVRLAETIGEKFKLGEKGNKNKKYVEAAKGTNLFFAVYVDEKGVRSFETIPFSVALERRKQKLAVVPEENENKEKLLFYLSPNDLVYVPDEDEKLIDYRQLSINPTRIYKMVSSSGTQCFFIPHFVASPIVQTMELGPNNKSERAWDGQMIKNVCYKLSVDRLGNVKIEK

SEQ ID NO: 58 - protein, 1515 aa, Anaerophaga thermohalophila DSM 12881
MKRILGLDLGTNSIGWALVESDEEQKSGKIQGIGSRIIPMDQNELDNFNKGNTVSQTAERTRLRMVRRLRERHLLRRERLHRVLKEIGFLPEHYLEQIDFTEKPGGFLPGKEPKIAYKPDNFKDKYDFLFQDSYHEMLSDFQDKNPEFIQKRKKVPQDWTIYYLRKKALTAKITKEELAWIILNFNQKRGYYQLRGEDEDVAKNTKKEEFHALKVVKVKEREDSEGASGKWYDIELENGWVYPRQSNIRPDWEGKILELIVTYNLDKDGNIKTDKEGNEKRSFRMPNKDDWTLRKKRTENEIEKSGKTVGEYIYDNLLDAPDLKIRGKLVSTIERKYYRSELEQILTAQKKYHPELSNSELFNKCISNLYPNNDIHRKALLSKDFVHLIINDIIFYQRPLKSKRSTVSNCPLEYRVYVDKVTGEKKKVPLKCIPKSHPLYQEFRLWQYVKNLRLFEKERFENGRLLTNVDVTEQFLPDEDKYVELFEFLNGRKTFKQDDILKFAGIKSAKDRVKYYWNYPQEKEYPGNETRYLIESRLKKIENVPDEWLNYEKIEELWHLLYSVTDKVEIEKGLQSFAAKYQLPDLFVEVFKGFPRMEREYGAFSKKAIKKLLPLMRMGKYWKLENINPDLIEKVQKIIDGEADDNINDGIRERFSEINEMSDLRGMPLWKASYLVYGRHSEAAEVIRWRTSADLDQYIKDFKQHALRNPIVEQVVLEALRVVKDVWNYFGEGREKFFDEIHVEIGRDLKNPADKRQKIANQIQENENTNLRIKALLVELFNDPEVQNVRPYSPVQQQLLKIYEDGVLNAERDIPDDIQKISRMANPTRNQLIRYKLWLEQKYRSPYTGEIIPLNKLFTSEYEVEHIIPRARYFDDSFSNKIISEAEVNRKKDRMLAFEFIKKLGGSTIDLNYGKKVSVLTVEEYQQFVKDHYGINPHSRLKMQKLLMDEIPESFIERQLNDSRYISKMVRNLLSNIVREENENSPVAKQLITCSGSITNTLKQEWGLNDVWNTIITPRFERLNKMGEQKYGEWVNKEGKPVFQIQMPLELQKGFNKKRIDHRHHALDALIVASATRSHVNYLSNEAAKTNAKDTRFDLRNRLCYKEKRGQNRNFTWRFYKPWNTFTEDAKNALNDIVVSFKSNHRVINKSTNRYFKWENLPGGMKKKRLVRQEKGDNWAIRQSLHKDTVLGKVSLRKVKPVSLSVALDSWNNIVDKALKKKIRSLKDQGYDKKLMLKYFKDRRNEYNGENISRVNVYYFDEEMAARRVDLDTSFNSEKRIEGITDSGIKKIIYAHLKNEKYHGQKDDKGKDISPYELAFSPEGIAEMNANIKQLNGGKPHCPIYKVRLAEPVGEKFQLGETGNKTEKLVEVAKGTNLFFGVYANDEGVRSFATVPFYLAVEREKQGLPAVPQENENGDQLLFWLSPNDLVYVPSEEDAHFANPKQIELDNSRIYKMVSSTGTQCFFIPHFVATPIVQTIELGPNNKSERAWDGQMIKKVCYKLSVDRLGNVEIE

SEQ ID NO: 59 - protein, 1168 aa, Azospirillum lipoferum
MARPAFRAPRREHVNGWTPDPHRISKPFFILVSWHLLSRVVIDSSSGCFPGTSRDHTDKFAEWECAVQPYRLSFDLGTNSIGWGLLNLDRQGKPREIRALGSRIFSDGRDPQDKASLAVARRLARQMRRRRDRYLTRRTRLMGALVRFGLMPADPAARKRLEVAVDPYLARERATRERLEPFEIGRALFHLNQRRGYKPVRTATKPDEEAGKVKEAVERLEAAIAAAGAPTLGAWFAWRKTRGETLRARLAGKGKEAAYPFYPARRMLEAEFDTLWAEQARHHPDLLTAEAREILRHRIFHQRPLKPPPVGRCTLYPDDGRAPRALPSAQRLRLFQELASLRVIHLDLSERPLTPAERDRIVAFVQGRPPKAGRKPGKVQKSVPFEKLRGLLELPPGTGFSLESDKRPELLGDETGARIAPAFGPGWTALPLEEQDALVELLLTEAEPERAIAALTARWALDEATAAKLAGATLPDFHGRYGRRAVAELLPVLERETRGDPDGRVRPIRLDEAVKLLRGGKDHSDFSREGALLDALPYYGAVLERHVAFGTGNPADPEEKRVGRVANPTVHIALNQLRHLVNAILARHGRPEEIVIELARDLKRSAEDRRREDKRQADNQKRNEERKRLILSLGERPTPRNLLKLRLWEEQGPVENRRCPYSGETISMRMLLSEQVDIDHILPFSVSLDDSAANKVVCLREANRIKRNRSPWEAFGHDSERWAGILARAEALPKNKRWRFAPDALEKLEGEGGLRARHLNDTRHLSRLAVEYLRCVCPKVRVSPGRLTALLRRRWGIDAILAEADGPPPEVPAETLDPSPAEKNRADHRHHALDAVVIGCIDRSMVQRVQLAAASAEREAAAREDNIRRVLEGFKEEPWDGFRAELERRARTIVVSHRPEHGIGGALHKETAYGPVDPPEEGFNLVVRKPIDGLSKDEINSVRDPRLRRALIDRLAIRRRDANDPATALAKAAEDLAAQPASRGIRRVRVLKKESNPIRVEHGGNPSGPRSGGPFHKLLLAGEVHHVDVALRADGRRWVGHWVTLFEAHGGRGADGAAAPPRLGDGERFLMRLHKGDCLKLEHKGRVRVMQVVKLEPSSNSVVVVEPHQVKTDRSKHVKISCDQLRARGARRVTVDPLGRVRVHAPGARVGIGGDAGRTAMEPAEDIS

SEQ ID NO: 60 - protein, 1068 aa, Bacillus cereus BAG4X12-1
MRYVLGLDIGIASCGWAVINQEKERIEDLGVRIFDKAENPKDGKSLAAPRRDARSTRRTLRRKKHRMQRIKILLVKQGLLFKTELNHLYESATEFDVWNLRLDALERKLHPKEFARVLIHLAKRRGFKSNRKETTLSENGQILESISENQQIMEQQNYRTVGEMILKDKKFENHKRNKDGTYIGTVTRQQLQDEIQMIFHTQRLYKNDYATEEFESSYLEIWASQRPYASKDQIEKMIGYCTLEPKEKRTPKASWSFQYFVALQTINNLRLISKDKIEELSFEEKKQIMNLALEKPIVKYIDIRKLLSIPNDFQFNSLSYSADTVDTTLENKRCIELKEYHSINKVYKQVYGKNTPNLLPIDYDTIAYGLTIFKDDKDILEYLQNKYVNAKGKPIKNLAKKTYDDTFIQALLNLNFTKMGHLSFKALKNIIPFLEEGLSYDKACEKAGYNFKGTSYTERTKYLPVIPQNTNPVVHRALSQTRKVINAIIKKYGSPNAIHIETARELSKTFQERKEIDSRYQDNSKKNEHAIHKLKELGNINPSGINIVKFKLWSEQDGRCMYSGKYIEPHRLFEEGYTEVDHILPYSRSLDDSYNNKILTLGTENQRKGNKTPYEYMGNTSIWDEFETRVQSNKKINFKKQQKLLLQNFSYAREQEFIERNLNDTRYATIYLTSLIQQHLIFSESSSKKKVRTVSGIITSHLRSRWGFNKDRKEGHIHHALDAVIVAVTSNHMIQRVTKYYKLKELNKNLQAKQLPFPEPWEGFRLELEARISPNTQQYLKGIHFKNYADVNLSDIKPIFVSRMPKRSITGELHQETIRKFLGYNEKGKVLTAIKTKLEDIPFDANGDFPMYGKETDLYTYNAIKERYLSHEKDKRKSFQEPLYKPTKSGEIGPLIKSIKIMDTRTIVNPVNQGKGVVYNSKIARTDVFKKEDKYYLIPIYTIDLLKNILPHKAITAGKGYEDWTTIDSSFTFLFSLFPNDLIQIVPSKNKTIKARTTVSKKEILLPSLTGYFKGVHSGTAGITVETHDGSVIANVGSKQLLLFEKYQVDVLGHYTKIKEEKRMGMAI

SEQ ID NO: 61 - protein, 1078 aa, Bacillus cereus BAG4X2-1
MRYVLGLDIGIASCGWAVINQEKERIEDLGVRIFDKAENPKDGKSLAAPRRDARSTRRTLRRKKHRMQRIKVLLVKHGLLSKTELDHLYESATEVDVWNLRLDALERKLYPKEFARILIHLAKRRGFKSNRKETTLSENGQILESISENQQIMEKQNYRTVGEMILKDKKFENHKRNKNGTYVGTVTRQQLQDEIQMIFHAQRLYKNDYATEEFESSYLEIWASQRPYASKDQIEKMIGYCTLEPKEKRAPKASWSFQYFVALQTINNLRLISKDRIEELSFEEKKQIMNLALEKSIVKYIDIRKLLSVPNEFQFNSLSYSADTVDTAVESRKCIELKEYHSINKVYKQIYGENALNLLPKYYDTIAYGLTIFKDDKDILEYLQNKYVNAKGKPISNFANKTYDDTFIQALLNLNFTKMGHLSFKALKNIIPFLEEGLSYDKACEKAGYNFKGTSYTEQTKYLPVIPQNTNPVVHRALSQTRKVINAIIKKYGSPNAIHIETARELSKTFQERKEIDSMYQDNSKKNEHAIHKLKELGNINPSGINIVKFKLWNEQDGRCMYSGKYIEPHRLFEEGYTEVDHILPYSRSLDDSYNNKTLTLGTENQRKGNKIPYEYMGNTSIWNDFETRVQSNKKINKKKQQKLLLQHFSYAREQEFIERNLNDTRYATIYLSSLIQQHLIFSESSRKKKVHTVSGIITSHLRSRWGFNKDRKEGHIHHALDAVIVAVTSDHMIQRVTKYYKLKELNRNLQAKRMPFPEPWEGFRLELEARISPNTQQYLKGLRFKNYADVNLSEIKSIFVSRMPKHSITGELHQETIRKFIGYNEKGKVLTAIKTKLEDIPFDANGDFPMYGKESDLYTYNAIKERYLSHKKDKRKSFQEPLYKPTKSGGIGPLIKSIKIMDTRTIVNPVNQGKGVVYNSKIARTDVFKKEEKYYLIPIYTIDLMKNILPQKAITAGKGYEDWTTIDPSFTFLFSLFPNDLIQIVPSKNKTIKARTTVSKKEVLLPSLTGYFKGVHSGTAGITVETHDGSVIANVGSKQLLLIEKYQVDVLGNYTKIKEEKRIGLTTYNDNKKIAAC

SEQ ID NO: 62 - protein, 1069 aa, Bacillus cereus Rock1-15
MNYDIGLRIGITSCGWSIINKDLERIEDLGVRVFEKAENPDGTASAAPRREARKSRRKHRRKKHRIERIKRLIVQHDLLSKKELDSLYLSPFNIDVWNLQVEALERKLDNREFARVLIHLVQRRGFQTIRKSVEIQEEGKLLENVSENERIMKVNGYKTVGEMFSKHEKFTHHKRNKDGSYTSVVTRSLLLKEIKTIFNSQRILGNVFSTQKLESDYLYIWGSQRPTLTYEQLMSMVGNCIYEKKEKRAPKTSWAFQYFSLLQKINKLKVSDDNTLRKLSKEERDIVIELAFKKKNVSFVDIRKALKLNDNTKFNHLTYSHVVETKKVEKATFIELKGYHLIKKQLKDRNVELTQELQPKDYDAIAAASTFFKNDIEFRDYLRNQYLDSNGKRKSNIANKVFEDKVIAAVFELNFSKVCHLSFKSLYKLIPHLEKGLDYKEAILCAGYNFRDENKRDKKLFLPVIQQETNPVVHRALTQARKVINAIIREYGSPNTIRFVVANDLAKTYKQRKELESTLKKNRAENEKIKTKLLSMGIINPTGMDIVKYKLWYEQSGICLYTGRQMELSSLFKPGYSIVNHIIPYNRSFDDTYHNRVLTLTETKYEKGNKIPFEYFGAEETCWNEYEKRVSTSKKIHDKKREKLLIRNFDIEYENEMISNNVFDTHYIGSYFEKYIDEHLQFKKSTKKQKVFSIHGNMVAHLHSRWGFNKNSREIYLNHAVDAAIVAVLTDQLIRNIADYYRRDNILEQKGSLKFPEPWKSFSIELEARISPQVRDLIKKLNLDSYLDVDILHIKPVFISKKPRRKVNGEAHKSTIRSLIGINEIGKTVTCIKTRLEDIPFDENGDFPMYGKDTDKYTYTAIKERYLEFNKDKEKAFSTPLYKLKRNGEPGNQIKSVKIIDTRNIVNKVNQGKGIAYNSNIIRVDVFSRDQKYYVVPIYLRDFIKGSLPNKIITAAKGFMQWPETDNSYTFLFSIFPNDLIKVVPKEGKFIKAKNENKENINLTEILGYFKGLDSSTGAFTLESHDGSLLARGIGTKNLLLIEKYQVDVLGRYNKVGNEERQDIKIQQN

SEQ ID NO: 63 - protein, 1088 aa, Bacillus smithii 7_3_47FAA
MNYKMGLDIGIASVGWAVINLDLKRIEDLGVRIFDKAEHPQNGESLALPRRIARSARRRLRRRKHRLERIRRLLVSENVLTKEEMNLLFKQKKQIDVWQLRVDALERKLNNDELARVLLHLAKRRGFKSNRKSERNSKESSEFLKNIEENQSILAQYRSVGEMIVKDSKFAYHKRNKLDSYSNMIARDDLEREIKLIFEKQREFNNPVCTERLEEKYLNIWSSQRPFASKEDIEKKVGFCTFEPKEKRAPKATYTFQSFIVWEHINKLRLVSPDETRALTEIERNLLYKQAFSKNKMTYYDIRKLLNLSDDIHFKGLLYDPKSSLKQIENIRFLELDSYHKIRKCIENVYGKDGIRMFNETDIDTFGYALTIFKDDEDIVAYLQNEYITKNGKRVSNLANKVYDKSLIDELLNLSFSKFAHLSMKAIRNILPYMEQGEIYSKACELAGYNFTGPKKKEKALLLPVIPNIANPVVMRALTQSRKVVNAIIKKYGSPVSIHIELARDLSHSFDERKKIQKDQTENRKKNETAIKQLIEYELTKNPTGLDIVKFKLWSEQQGRCMYSLKPIELERLLEPGYVEVDHILPYSRSLDDSYANKVLVLTKENREKGNHTPVEYLGLGSERWKKFEKFVLANKQFSKKKKQNLLRLRYEETEEKEFKERNLNDTRYISKFFANFIKEHLKFADGDGGQKVYTINGKITAHLRSRWDFNKNREESDLHHAVDAVIVACATQGMIKKITEFYKAREQNKESAKKKEPIFPQPWPHFADELKARLSKFPQESIEAFALGNYDRKKLESLRPVFVSRMPKRSVTGAAHQETLRRCVGIDEQSGKIQTAVKTKLSDIKLDKDGHFPMYQKESDPRTYEAIRQRLLEHNNDPKKAFQEPLYKPKKNGEPGPVIRTVKIIDTKNKVVHLDGSKTVAYNSNIVRTDVFEKDGKYYCVPVYTMDIMKGTLPNKAIEANKPYSEWKEMTEEYTFQFSLFPNDLVRIVLPREKTIKTSTNEEIIIKDIFAYYKTIDSATGGLELISHDRNFSLRGVGSKTLKRFEKYQVDVLGNIHKVKGEKRVGLAAPTNQKKGKTVDSLQSVSD

SEQ ID NO: 64 - protein, 1069 aa, Bacillus thuringiensis
MNYDIGLRIGITSCGWSIINKDLERIEDLGVRVFEKAENPDGTASAAPRREARKSRRKHRRKKHRIERIKRLIVQHDLLSKKELDSLYLSPFNIDVWNLRVEALERKLDNREFARVLIHLVQRRGFQTIRKSVEIQEEGKLLENVSENERIMKVNGYKTVGEMFSKHEKFTHHKRNKDGSYTSVVTRSLLLKEIKTIFNSQRILGNVFSTQKLESDYLYIWGSQRPTLTYEQLMSMVGNCIYEKKEKRAPKTSWAFQYFSLLQKINKLKVSDDNTLRKLSKEERDIVIELAFKKKNVSFVDIRKALKLNDNTKFNHLTYSHVVETKKVEKATFIELKGYHLIKKQLKDRNVELTQELQPKDYDAIAAASTFFKNDIEFRDYLRNQYLDSNGKRKSNIANKVFEDKVIAAVFELNFSKVCHLSFKSLYKLIPHLEKGLDYKEAILCAGYNFRDENKRDKKLFLPVIQQETNPVVHRALTQARKVINAIIREYGSPNTIRFVVANDLAKTYKQRKELESTLKKNRAENEKIKTKLLSMGIINPTGMDIVKYKLWYEQSGICLYTGRQMELSSLFKPGYSIVNHIIPYNRSFDDTYHNRVLTLTETKYEKGNKIPFEYFGAEETCWNEYEKRVSTSKKIHDKKREKLLIRNFDIEYENEMISNNVFDTHYIGSYFEKYIDEHLQFKKSTKKQKVFSIHGNMVAHLHSRWGFNKNSREIYLNHAVDAAIVAVLTDQLIRNIADYYRRDNILEQKGSLKFPEPWKSFSIELEARISPQVRDLIKKLNLDSYLDVDILHIKPVFISKKPRRKVNGEAHKSTIRSLIGINEIGKTVTCIKTRLEDIPFDENGDFPMYGKDTDKYTYTAIKERYLEFNKDKEKAFSTPLYKLKRNGEPGNQIKSVKIIDTRNIVNKVNQGKGIAYNSNIIRVDVFSRDQKYYVVPIYLRDFIKGSLPNKIITAAKGFMQWPETDNSYTFLFSIFPNDLIKVVPKEGKFIKAKNENKENINLTEILGYFKGLDSSTGAFTLESHDGSLLARGIGTKNLLLIEKYQVDVLGRYNKVGNEERQDIKIQQN

SEQ ID NO: 65 - protein, 1509 aa, Bacteroides coprophilus DSM 18228
MKKTLGLDLGTNSIGWAVINSNIDSEGKEKLVGISSCGSRIIPMDATTLGDFGKGNTKSPVAERTRLRGIRRLLERSLLRRERLHRVLSVMGFLPEHYASQLDRYGKFLPETEPKLAWYKDDSGRYQFLFQKSFHEMLEDFRQHQPELVAGEKKIPYDWTIYYLRKKALSQEITKEELAWILLNFNQKRGYYQLRGEEEQEENNKSVEYHALKVVSVEDSGERKGKDIWYNVTLENGWVYRRASNIPLDWTGKVKEFVVTTELDDAGNPKKDKEGNVKRSFRAPKEDDWGLLKTRTQAQIDESGKTVGTYIYESLLCMPNQKIRGKLVRTIERKYYKDELRQILVKQSEFHAALQDHNLLLSCIEELYPNNEAHRRLLSASSFIYFLIEDILFYQRPLKSQKGLIDNCPYESHIYKDKKDGSLHHVPLKCVSKSHPLFQEFRLWQFLSNLRIYQRERMMDGSLKLDVDVTREFLPSEEDYVKLFDWLNERKEISQKFLLAYKPFGLKKNEQANYRWNYVEDKSYPCNETRAEIKSRLSKAGVPEEFLTEEKEEALWHILYSISDKKELTKALGTFAAKNCLNESFVEVFAKIPPFESNYAAYSLKAIRKLLALMRMGKYWNEQAIDRQTRDRIEKILTGEYDETIRSRVREKAMLLTDISSFRGLPLWLACYIVYDRHSESKELVKWETPADIDHFLSKFKQNSLRNPIVEQVITESLRTVRDIWKQEGKIDEIHVELGREMKNPAKERARITAQVQENENTNLRIKALLAEFMNPEFEIENVHPYSPGQQEILRIYEDGVLSGIAEKDLPDDITAILKKFRENDVKKRPTTSEVLRYKLWLEQRYRSPYTGRVIPLGKLFTPAYEIEHVIPQSRYFDDSISNKVICESAVNKLKDNCLGYEFIKKHSGEMVELGNGETVPVFSVEEYERFVKESYFGNSKKMKKLLLEDIPDSFIERQLNDSRYISRVVTSLLSNLVCEEGEQDGLSKNVIVCTGGITDRLKKDWGVQEVWNRIILPRFLRLNEITGRTDFTSTSVNGHLLPALPLYLQKGFNKKRIDHRHHAMDAIVIACANRNIVNYLNNSSARKNSEISRYDLQRLLCEKVKTDANGNYKWILRKPWETFTQDVYAALTNIVVSFKQNLRVINRTTNYYQHYNEAGEKRMIPQTKGDRWAIRKPMHKDTVYGEVNLRKEKTLPLRDVVKNPSIVVDKSLKNKLYELLKSQYDLKAIAKYFETHQDVWADVNLKKIKVYYFTKETNERFFATRKSLDPSFDQKKIEEEVTDTGVQKILLHHLQQNNNDPDMAFSPDGIDRMNQNMTILNDGKWHQPIYKVRTYEKADKFAVGESGNKAKKFVEAAKGTNLFFAVYESVQEDEAIGKQVCKRTFATIPLNEVIKRKKQGLPAAPEDLNGNLPKFVLSPNDLVYLPTEEERNSSRIIQPLDRERIYKMVSSSGSQCFFIKVFVANSIWDKNEYSSLNKMERAITNEMIKEICVPIKIDRLGNVSLIQI

SEQ ID NO: 66 - protein, 1504 aa, Bacteroides coprosuis DSM 18011
MKKVLGLDIGTNSVGWAVVNQNDKGEFLSIEKIGSRIIPMSQDVMDKFGAGQTESSTAQRTQYRGVRRLRERSLLRRERLHRVLHILHFLPQHYDAAIGWNKKENKTYGKFLPGVEVNIPWVATDQGHQFIFMDSYAEMLKDLKQHQPHLFEKSSTPVPLDWTIYYLRKKALTQAISKEELAWILLNFNQKRGYYQLRGEEVEDNTKREEFYALKVVKVELDKDNTSAKTWYKVHLENGFIYPCPSDTPIDSWVGMVKDFIVTTTLEKDGSEKRTADGEIKRSFRAPKEDDWTLLKKKTESELEKSGKQVGAFIYDTLLSNPDQKIIGGLIKTIERKYYKKELEQILETQQKFIAELSDKKLFQACAEELYPLNDSHRENLLERDFKHLFVQDIIFYHRPLKTKKSLISNCTYEYRTFYKNGEKQISPIKCIAKSNPLFQEFRVWQFVQNLRILQRQRSEGDSIKYNVDVTAEFLKDENDIANLFTWLNERKVIKQDQLLKSYFKLKVNKETKELDYRWNYVDDKNKEYPCNATRTHILSFLEKCKEEKRIEDDRFVYSLWHLLYSVVEPIELRGALAKFAEREHLHPSFVDVFAQFPPLEKEYGSYSEKAIKRLLPLMRMGDYWHEDKIDVKTKQRIQRIIDGEADDDITHRSREKVENLRSITDFKGLPLWKAGYVVYNRHSESGELTKWKTPHELSNYIQNEFKQYSLRNPIVEQIVLETLRVVHDLWVKHGDFSEIHLELGRDIKNSSDKRKRMAERQQENENSRQRVLEMLIDLKKEAAFADLNPYSPSQQEKLRIVEDGVLRSNIEIPKDIEKITKSAKPTSRELTKYRLWLDQKYRSPYTGQPISLAQLFTSKYEIEHVIPQAKYFDDSFTNKVICESEVNKEKGSMLAHEFILKNGGSTVNVGGRQVQVLKNDAYVELINRLYGKNNPVKAKKLLAEDIDEVVGDFSERQLNDTRYISRVVQKLLSNIVREEDEQESTSKHVIGCSGQVTTALKKDWGLNDIWNKIIQPRFERLNEMTATEDYGVWQSPNHFQIRVPEEIQKGFTKKRIDHRHHAMDALVIACATRSHINYISNRSGQDRNAKFETTRTDLRSKLCYKENSSGNNYNYIFNKPWDTFTQDAHRALENIVVSHKQNLRVLTKTNNYTQFINKDGKKDLQKQVKGDHFAVRKPMHQETIYGRVSIRSIKEVALKKALENWKQIVDRTLKDKIRELIGAYGKYDAQTILKYFKDRDYKFNNLKINRVEVYEYDHNCAAVRKSIGDDLTIKQIERITDESIRKILMNHLSNYDDNLKEAFSPEGLMEMNKNIKELNGGKNHQPIYKVRLFEDLGSKFPLGVSHNNPDKYAIAAKGTNLFFGIYEDQEGKRMFDSIPLNIVIDRLKEKKSPVPETYNESKLKFHLSPNDLVYVPTDEEQKQPELVDVDHLSDEQKGRVYKAVSFTGNRAFFVNHRVSKVIHDYVEFGTKNKIENDDDKRSLKHICWKLKVNRLGEITDVKR

SEQ ID NO: 67 - protein, 1504 aa, Bacteroides dorei DSM 17855
MKNIVGLDLGTNSIGWAVVNGSVNDDGSEQLVKIQASGSRIIPMDAAMIGDFNKGNSISQTAERTRLRGVRRLSERYLLRRERLHRILDILGFLPFHFAQDLDRHGKIVKGKEPKLAWRKNEAGQFEFIFQDSFKEMLEDFKLNYPNLITDDKKVPYDWTIYYLRKKGLTSKISKEELAWILLNFNQKRGYYQLRGEEEEENKDKLVEFYALKVVAVEDSGEKKGKDIWYNVHLENGWVYRRTSNMSLDWVGKTKEFIVTTDLEKDGTPKKDKEGNVKRSFRAPKEDDWSLVKKKTEADIDQTHKTVGAYIYDTLLGNPSQKIRGRLVRTIERKYYKEELKLILEKQKEFHLELQDRALYAACIEELYPINEAHRNNVGNRDFTYLFLEDILFYQRPLKSKKSLIDNCPYEENQGLDKETGEIKSFPVKCIAKSHPLFQEFRLWQFIINLRIYRKDLAQDVDVTNELLKTEEDYVALFDWLNGKKEIDQKAFLKYPVFGLKKEIENYRWNYVQDKPYPCNETRSLMLARLEKCDISIEFLTKENEEALWHILYSVEDKNEIVKALQKFADKHDLNASFVDVFQKFPPFKKEYGSYSAKAIKKLLPLMRMGKYWSENSIDKGTRERIDKIITGEYDEKIENRVREKAIHLADVSDFKGLPLWLVCYIVYGRHSEAKEIIQWKSPADIDSYLRSFKQHSLRNPIVEQIIIETLRVVRDIWKQVGNIDEIHVELGREMKNPADKRKKMTQQMSENENTNLRIKYLLTEFLNPEYEVENVRPYSPSQQDILRIYEEGVLNSVSDLPEEISDILKKFTETDLKKRPSRSEVLRYKLWLEQKYRSPYTGEVIPLGKLFTPAYEIEHVIPQSYYFDDSFSNKVICEAEVNKLKSNLLGHEFIVKHHGEIVELPFGKKVRIFTVDEYEQFVKDNYSRTRSKMKKLLMDDIPEEFVTRQLNDSRYISKVVKSLLSNIVREKGEEEAISKNVIPCTGGVTDRLKKDWGINEVWNKIILPRFQRLNELTGTNKFTTKNVGIQEIPTMPLELQKGFNKKRIDHRHHAMDAIIIACANRNIINYLNNKSATAKAELSRYDLQKMLCDKAKTDNNGNYKWVIRKPWASFTQDTYLALENIIVSFKQNLRVINKATNRFLHYNEEGKKIFVKQGKGDNWAIRKSMHKDTVFGEVNLRRIKTVALNEAMKNPQSIVVKDFKRKLLELWNLGFDAKRIKKYFEDNRETWSDINLSKIEVYYFSKDTKDRFFATRKPLDTSFDRKKIENNITDTGIQKILLRHLELKDNNPDIAFSPDGIDEMNRNIIQLNNGKYHQPIIKIRWYEQADKFAVGQTGNKSSKFVEAAKGTNLFFAVYESNILDKKTNTIIKKRNYATIPLNVAIERQKQGLPVAPEDENGNDPIFVLSPNDLVYLPTDDELANGIIAQPLDRGRIYKMVSSSGEQCFFIKHIVANVLVDKFEFSPLNKMERALTGEMIKMICIPIKVDRLGNVLESSSSYKK

SEQ ID NO: 68 - protein, 1509 aa, Bacteroides eggerthii 1_2_48FAA
MKTILGLDLGTNSVGWAVINSVIKEQAERIWIEMAGSRIIPMDAAVLGDFDKGNSISQTSERTRLRGARRLRERQLLRRERLHKVLNILGFLPNHYLEYIDFEKHPGKFLADAEPKLAWVKDEQGKYTFLFQAAFDEMLADFAIHQPSLVSGDKKIPYDWTIYYLRKKALTEMISKEELAWILLNFNQKRGYYQLRGEEEEDNAGKSVEFYALKVLTVEATDEKKGRDVWYNVHLENGWIYRRSSSVPLDWEGQVKEFIVTTDLNPDGTPKLDKYGEVKRSFRAPKEDDWMLIKKRTEADIANTHKTVGAYIYDTLLQKPQQKIIGKLVKTVERKLYRDELSLILQKQCAFHAELQDRALYARCVEALYPSNEVRRKNIANRDFVYLLMDDILFYQRPLKTKKSLIANCPYEENEYVDRETGEIKKTPLKCIAKSHPLFQEFRLWNFLSNIRIYQKEKEINGTLHLDVDVTAEFLKTEDDYVALFDWLNSRKEIEQKTFLKYPKFGLKKEISNYRWNYVEDKQYPCNETRHAILSSLEKANVCIDFLSNEKEVALWHILYSVSDKQEIEKALRTFAAKNGLDESFVEAFKKFPPFKSEYGAYSAKAIKKMLPLMRCGKYWDVSSIDDTTKERIKKIVTGEYDERISVKVRDKVMNLSDISCFRRLPLWLACYIVYNRHSEDKEAVKWESPADIDAYLASFKQHSLRNPIVEQVITETLRVVRDIWKQVGRIDEIHIELGREMKNPADKRKRMTAQILENENANLRIKALLAEFMNPEYEIENVRPYSPSQQEILRIYEDTVLHAEDQLPEEIDAILKKFNSSKVPTKSEFLRYKLWLEQKYRSPYTGELIPLGKLFTAAYEIEHVIPQSRYFDDSFSNKVICESAVNKLKDNQLGYEFIKNHHGQKVEVGFGKSVEIFSVDSYERFVKEQYAKSAVKMKKLLMDDIPEQFIERQLNDSRYISKVIKGLLSNIVREKNDSGEYEPEAVSKNIVVCTGSVTDRLKRDWGMNDVWNSIVYPRFERLNSLTDTQSFGHWENKSGKKVFQTELPLEYQKGFSKKRIDHRHHAMDAIVIACATRNHVNYLSNESASRNAKISRYDLQRLLCDKNRTDDNGNYKWVIKKPWDTFTQDAREVLSKIVVSLKQNLRIINKTTNVYRHLDATGNRVYEKQKTGDSWAIRKPMHKDTVFGAVNLRKVKVVRLSVALDTPAMIVDKRVKNKVFELLSYKYDKKRIEKYFKENAFLWKELDLAKVAVYYFTEATTEPLVAVRKPLDSTFNEKKIKESVTDTGIQKILLNHLCTKEGKPDLAFSAEGIEEMNRNLLQLNNGKSHQPIYKVRVYEPRGNKFSVGVLGNKGTKWVEAAKGTNLFFAIYITEDGKRTYETIPLNVVIEREKQGLVPVPDRNKKGDKLLFWLSPNDLVYLPTEEEREFGRINEPIDRGRIYKMVSCTGNEGHFIPANVANPIVPVIELGSNNKAQRAWTNEMIKDICIPIKVDRLGHIIEVKYRIDE

SEQ ID NO: 69 - protein, 1526 aa, Bacteroides faecis MAJ27
MKKILGLDLGTNSIGWAVLNAADDNSLKYIEAAGSRIIPMDAAILGDFDRGNSISQTAERTRIRGMRHLRERYLLRRARLHRILNLLGFLPFHYAQDIDRYGNFSADMEPKIAWCKNLEGELEFIFIESFNEMLEDFRKNQPELVADNKKVPYDWVIYYLRKKALEKKISKEELAWILLNFNQKRGYYQLRGEDDDESMKTAKTRQYFDKQIIKNIIDTNQTYKGQRILIVELQNGDKGKIFKKEIPDWIGQEKNIIVTVDIDKDGNDKYEESGSLSCRFKIPTDAEWESEWKLIKMKTQKDLDESNKTVGTYIYDSILQNPTQKVRGKLVRTIERKYYKAELKQILEKQTEFHSELQDKDLYIECLNELYSNNDTHRNAITDRDFVYLFMNDILFYQRPLKSKKSLIDNCPYERNIYIDKETGEIKYSPIKCIAKSHPLFQEFRLWKFISSIRIYQRESVVEVVDKQLDLFSSQSTSVQKLVTDVDVTDKFLTCENDYVALFEWLNKKKIIDQKEFLKYRPFGLKGDIDNYRWNYVEDKSYPCNETHAMILTYFAKAGISEDILTKEMEEALWHILYSVEDRQEITKALRTFASKYHLSDSFVKVFSNIPPFKKEYGSYSAKAIKKLLSLMRMGKYWSEDAIDVNTRERIDKIVTGEYDEKIRDRVREKTIRLNDIRHFRALPDWLACYVVYDRHSETREITEWKSPEEIDEYIRNFKQHSLRNPIVEQVITETLRTVRDIWKQVGCIDEIHVELGREMKNPADKRKRITSQIIENENANLRVKALLTEFVNSEFEIENVRPYSLSQQDILRIYEDGVLNSVAEVPGDIAGILKKFNENDAKKRPTTSEILRYKLWLEQKYRSPYTGEMIPLSKLFTSAYEIEHVIPQSRYFDDSFSNKVICEAEVNKLKDNALGYEFIKKHHGEKVELGFGKIVEIFSVSVYEQFVKDNYSRNRGKMKKLLMDEIPEQFIERQLNDSRYISKVVKTLLSNVVREKAEQEAVSKNVIVCTGGVTDRLKKDWGINDVWNKIVLPRFLRLNELTNSTNFTAKNAAGNEIPAMPLELQKGFNKKRIDHRHHAMDAIVIACANRNIVNYLNNESASRKAKISRHDLQAILCDKVRTDDKGNYQWRVKKPWDTFTQDVYVALENIIVSFKQNLRVINKTSNYYWHYENGKKVLVKQVKGDSWAIRKPMHKDTVFGEVNLRKVKSVSLNEALKNPQFIVEKDLKRQLLSLLQQNFDIKKIKKYFEEHKDIWSDISLSKMNIYYFTKETKDRYFATRKPLDASFDKKKIESCITDTGIQQILLRHLELKENDPERAFSPDGIDEMNRNIIQLNKGKGHHPIAKVRVYEKADKFEVGQRGNKSSKFVEAAKGTNLFFAVYETEYPDEKTNSIVRKRNYATIPLNIAIERQKRGLSTAPEDEKGNVPSFVLSPNDLVYLPTSEDIVNGHITQPIDKSRIYKMVSSSGSQCFFIKHNIANIIVDKYEFSPLNKMERAISNEMIKEICIPVKVDRLGNIVKLGKSE

SEQ ID NO: 70 - protein, 1509 aa, Bacteroides fluxus YIT 12057
MKTILGLDLGTNSVGWAVINSVIKEQAERIWIEMAGSRIIPMDAAVLGDFDKGNSISQTSERTRLRGVRRLRERQLLRRERLHKVLNILGFLPNHYLEYIDFEKHPGKFLSDAEPKLPWVKDEQGKYTFLFQAAFDEMLADFAIHQPSLVSGDKKIPYDWTIYYLRKKALTEMISKEELAWILLNFNQKRGYYQLRGEEEEDNAGKSVEFYALKVLTVEATDEKKGRDVWYNVHLENGWIYRRSSSVPLDWEGQIKEFIVTTDLNPDSTPKLDKYGEVKRSFRAPKEDDWMLIKKRTEADIANTHKTVGAYIYDTLLQKPQQKIIGKLVKTVERKLYRDELSLILQKQCAFHAELQDRTLYARCVEALYPNNEVQRRNIANRDFVYLLMDDVLFYQRPLKTKKSLIANCPYEENEYVDRETGEIKKAPLKCIAKSHPLFQEFRLWNFLSNIRIYQKEKEINGTLHLDVDVTAEFLKTEDDYVALFDWLNSRKEIEQKTFLKYPKFGLKKEISNYRWNYVEDKQYPCNETRHAILSRLEKANVCIDFLSNEKEVALWHILYSVSDKQEIEKALRTFAAKNGLDESFVEAFKKFPPFKSEYGAYSAKAIKKLLPLMRCGKYWDVSSIDDTTKERIKKIVAGEYDERIAVKVRDKVMNLSDISCFKRLPLWLACYIVYNRHSEDKEAVKWESPADIDAYLASFKQHSLRNPIVEQVITETLRVVRDIWKQVGRIDEIHIELGREMKNPADKRKRMTAQILENENANLRIKALLAEFMNPEYEIENVRPYSPSQQEILRIYEDMVLHAEDQLPEEIDAILKKFNSSKVPTKSEFLRYKLWLEQKYRSPYTGELIPLGKLFTAAYEIEHVIPQSRYFDDSFSNKVICESAVNKLKDNQLGYEFIKNHHGQKVEVGFGKSVEIFSVDSYERFVKEQYAKSAVKMKKMLMDDIPEQFIERQLNDSRYISKVIKGLLSNIVREKNDSGEYEPEAVSKNIVVCTGSVTDRLKRDWGMNDVWNSIVYPRFERLNSLTDTQSFGHWENKSGKKVFQTELPLEYQKGFSKKRIDHRHHAMDAIVIACATRNHVNYLSNESASRNAKISRYDLQRLLCDKSRTDDNGNYKWVIKKPWDTFTQDAREVLSKIVVSLKQNLRIINKTTNVYRHLDATGNRVYEKQKTGDSWAIRKPMHKDTVFGAVNLRKVKVVRLSVALDAPTMIVDKRVKNKVFELLSYKYDKKRIEKYFKENAVLWKELDLARVAVYYFTEATTEPLVAVRKPLDSTFNEKKIKESVTDTGIQKILLNHLCTKEGKPDLAFSAEGIEEMNRNLLQLNNGKRHQPIYKVRVYEPRGNKFSVGVLGNKGTKWVEAAKGTNLFFAIYITEDGKRTYETIPLNMVIEREKQGLAPVPDKNEKGDKLLFWLSPNDLVYLPTEEELEFGRINEPIDRGRIYKMVSSSGNQCFFIPQSISNAIIPTKELGANNKAERSWDGAMIKNICIPVKVDRLGRIIEVKYRINE

SEQ ID NO: 71 - protein, 1436 aa, Bacteroides fragilis
MKRILGLDLGTNSIGWALVNEAENKDERSSIVKLGVRVNPLTVDELTNFEKGKSITTNADRTLKRGMRRNLQRYKLRRETLTEVLKEHKLITEDTILSENGNRTTFETYRLRAKAVTEEISLEEFARVLLMINKKRGYKSSRKAKGVEEGTLIDGMDIARELYNNNLTPGELCLQLLDAGKKFLPDFYRSDLQNELDRIWEKQKEYYPEILTDVLKEELRGKKRDAVWAICAKYFVWKENYTEWNKEKGKTEQQEREHKLEGIYSKRKRDEAKRENLQWRVNGLKEKLSLEQLVIVFQEMNTQINNSSGYLGAISDRSKELYFNKQTVGQYQMEMLDKNPNASLRNMVFYRQDYLDEFNMLWEKQAVYHKELTEELKKEIRDIIIFYQRRLKSQKGLIGFCEFESRQIEVDIDGKKKIKTVGNRVISRSSPLFQEFKIWQILNNIEVTVVGKKRKRRKLKENYSALFEELNDAEQLELNGSRRLCQEEKELLAQELFIRDKMTKSEVLKLLFDNPQELDLNFKTIDGNKTGYALFQAYSKMIEMSGHEPVDFKKPVEKVVEYIKAVFDLLNWNTDILGFNSNEELDNQSYYKLWHLLYSFEGDNTPTGNGRLIQKMTELYGFEKEYATILANVSFQDDYGSLSAKAIHKILPHLKEGNRYDVACVYAGYRHSESSLTREEIANKVLKDRLMLLPKNSLHNPVVEKILNQMVNVINVIIDIYGKPDEIRVELARELKKNAKEREELTKSIAQTTKAHEEYKTLLQTEFGLTNVSRTDILRYKLYKELESCGYKTLYSNTYISREKLFSKEFDIEHIIPQARLFDDSFSNKTLEARSVNIEKGNKTAYDFVKEKFGESGADNSLEHYLNNIEDLFKSGKISKTKYNKLKMAEQDIPDGFIERDLRNTQYIAKKALSMLNEISHRVVATSGSVTDKLREDWQLIDVMKELNWEKYKALGLVEYFEDRDGRQIGRIKDWTKRNDHRHHAMDALTVAFTKDVFIQYFNNKNASLDPNANEHAIKNKYFQNGRAIAPMPLREFRAEAKKHLENTLISIKAKNKVITGNINKTRKKGGVNKNMQQTPRGQLHLETIYGSGKQYLTKEEKVNASFDMRKIGTVSKLAYRDALLKRLYENDNDPKKAFAGKNSLDKQPIWLDKEQMRKVPEKVKIVTLEAIYTIRKEISPDLKVDKVIDVGVRKILIDRLNEYGNDAKKAFSNLDENPIWLNKEKGISIKRVTISGISNAQSLHVKKDKDGKPILDENGRNIPVDFVNTGNNHHVAVYYRPVIDKRGQLVVDEAGNPKYELEEVVVSFFEAVTRANLGQPIIDKDYKTTEGWQFLFSMKQNEYFVFPNEKTGFNPKEIDLLDVENYGLISPNLFRVQKFSLKNYVFRHHLETTIKDTSSILRGITWIDFRSSKGLDTIVKVRVNHIGQIVSVGEY

SEQ ID NO: 72 - protein, 1436 aa, Bacteroides
MKRILGLDLGTNSIGWALVNEAENKDERSSIVKLGVRVNPLTVDELTNFEKGKSITTNADRTLKRGMRRNLQRYKLRRETLTEVLKEHKLITEDTILSENGNRTTFETYRLRAKAVTEEISLEEFARVLLMINKKRGYKSSRKAKGVEEGTLIDGMDIARELYNNNLTPGELCLQLLDAGKKFLPDFYRSDLQNELDRIWEKQKEYYPEILTDVLKEELRGKKRDAVWAICAKYFVWKENYTEWNKEKGKTEQQEREHKLEGIYSKRKRDEAKRENLQWRVNGLKEKLSLEQLVIVFQEMNTQINNSSGYLGAISDRSKELYFNKQTVGQYQMEMLDKNPNASLRNMVFYRQDYLDEFNMLWEKQAVYHKELTEELKKEIRDIIIFYQRRLKSQKGLIGFCEFESRQIEVDIDGKKKIKTVGNRVISRSSPLFQEFKIWQILNNIEVTVVGKKRKRRKLKENYSALFEELNDAEQLELNGSRRLCQEEKELLAQELFIRDKMTKSEVLKLLFDNPQELDLNFKTIDGNKTGYALFQAYSKMIEMSGHEPVDFKKPVEKVVEYIKAVFDLLNWNTDILGFNSNEELDNQPYYKLWHLLYSFEGDNTPTGNGRLIQKMTELYGFEKEYATILANVSFQDDYGSLSAKAIHKILPHLKEGNRYDVACVYAGYRHSESSLTREEIANKVLKDRLMLLPKNSLHNPVVEKILNQMVNVINVIIDIYGKPDEIRVELARELKKNAKEREELTKSIAQTTKAHEEYKTLLQTEFGLTNVSRTDILRYKLYKELESCGYKTLYSNTYISREKLFSKEFDIEHIIPQARLFDDSFSNKTLEARSVNIEKGNKTAYDFVKEKFGESGADNSLEHYLNNIEDLFKSGKISKTKYNKLKMAEQDIPDGFIERDLRNTQYIAKKALSMLNEISHRVVATSGSVTDKLREDWQLIDVMKELNWEKYKALGLVEYFEDRDGRQIGRIKDWTKRNDHRHHAMDALTVAFTKDVFIQYFNNKNASLDPNANEHAIKNKYFQNGRAIAPMPLREFRAEAKKHLENTLISIKAKNKVITGNINKTRKKGGVNKNMQQTPRGQLHLETIYGSGKQYLTKEEKVNASFDMRKIGTVSKSAYRDALLKRLYENDNDPKKAFAGKNSLDKQPIWLDKEQMRKVPEKVKIVTLEAIYTIRKEISPDLKVDKVIDVGVRKILIDRLNEYGNDAKKAFSNLDKNPIWLNKEKGISIKRVTISGISNAQSLHVKKDKDGKPILDENGRNIPVDFVNTGNNHHVAVYYRPVIDKRGQLVVDEAGNPKYELEEVVVSFFEAVTRANLGLPIIDKDYKTTEGWQFLFSMKQNEYFVFPNEKTGFNPKEIDLLDVENYGLISPNLFRVQKFSLKNYVFRHHLETTIKDTSSILRGITWIDFRSSKGLDTIVKVRVNHIGQIVSVGEY

SEQ ID NO: 73 - protein, 1512 aa, Bacteroides nordii CL02T12C05
MKNILGLDLGTNSIGWAVINSEEDGPIVKKRIELAGSRIIPMDAAVLGNFDSGVTKSQTAERTSFRSIRRLRERQLLRRERLHKVLQILGFLPEHYVNDIDFENHPGKIKRNTEPKLPWRKNSMGQFEFIFQDSFEAMLTDFATHQPVFVSEGKKVPYDWTLYYLRKKALTEGISKEELAWLILNFNQKRGYYQLRGEEEEEQSNKLVEFYALRVVKVEATDDKKGKDTWYNVHLENGWIYRRTSNIPLDWEGKVKEFIVTTDLNEDGTPKLDKYGEVKRSFRAPKEDDWTLIKKKTESDIANSHKTVGCYIYDALLQNPHQKIKGRLVRTVERKFYKEELRLILEKQLSFHPELQDRDLYRACIDALYVSNEAHKNNISGRDFVYLFIDDIIFYQRPLKTKKSLIDNCPYEENQYMDRETGEVKQAPIKCIAKSHPLFQEFRLWQFISNIRIYQRERVLDDGKLETDVDVTPDFLKTEDDYTTLFEWFNDRKEVDQKAFLKNPQFGLKKTFTEYRWNYVEDKSYPCNETRNAILNGLQKAGVSADFLSREVEEALWHILYSVEDKIEIESALRKFASKHDLDDRFADVFKKLPPFKKEYGAYSAKAIKKLLPLMRIGKYWELSNIDDKTKERIDKIITGEWDENIHDRVREKAIKLSDITDFKGLPLWLSCYVVYNRHSEARAIAKWESPEDIDSYLRLFRQHSLRNPIVEQVITETLRTVRDIWKRVGQIDEIHVELGREIKNPADKRAKMTAQIVENENTNLRIKALLAEFINSEYEIENVRPYSSNQQEKLKIYEDTVLNGVKEIPEDINTILKKFRESDLKKRPTKSDFLHYKLWLEQKYCSPYTGRIIPLGKLFTSAYEIEHIIPQAHYFDDSFSNKVICEAEVNGLKDKKLGYEFIKHNPGKMVEIGFGKPPVRIFSVEEYERFVKENYSGIKNKMNKLLMDDIPETFIERQLNDSRYISKVVKSLLSNIVREKDSNGEYEPEAISKNVIVCTGSVTDRLKRDWGVNDVWNSIIYPRFERLNELTGSQQFGCWENKEGKRVFQTAVPLEMQKGFSKKRIDHRHHAMDAIVIACATRNHINYLSNESASKKAKISRTDLQRLLCTKCRTDDNGNYKWIVKKPWPAFTQDIRKALENITVSFKQNLRVINKTTNYYVHFDESGKKVLEKQINGDSWAIRKPMHKDTVFGKVNLQKVKEVRLSLALDTPKMIVDKKLKEKVLQLYSYKYDKKRIDKYFKENASLWKDLNLSKVAVYYFTNDSTEPLVAVRKPLDTSFNAKKIKESVTDTGIQKILLNHLSNNQDDPNLAFSPDGIDKMNKNLTALNDGKYHQPIYKVRVCEPQGNKFSVGTSGNKTSKYVEAAKGTNLFFAVYQTEDGKRSYETIPLNVVIEREKLGWTPVPENNNNGDKLLFWLSPNDLVYVPTADELNNGMRLDNMDKGRIYKMISCSGPQCFFIPQNVSNAIIPVIELGANNKAEKSWNNEMIKVVCVPIRVDRLGCITQINNQK

SEQ ID NO: 74 - protein, 1436 aa, Bacteroides sp. 2_1_16
MKRILGLDLGTNSIGWALVNEAENKDERSSIVKLGVRVNPLTVDELTNFEKGKSITTNADRTLKRGMRRNLQRYKLRRETLTEVLKEHKLITEDTILSENGNRTTFETYRLRAKAVTEEISLEEFARVLLMINKKRGYKSSRKAKGVEEGTLIDGMDIARELYNNNLTPGELCLQLLDAGKKFLPDFYRSDLQNELDRIWEKQKEYYPEILTDVLKEELRGKKRDAVWAICAKYFVWKETYTEWNKEKGKTEQQEREHKLEGIYSKRKRDEAKRENLQWRVNGLKEKLSLEQLVIVFQEMNTQINNSSGYLGAISDRSKELYFNKQTVGQYQMEMLDKNPNASLRNMVFYRQDYLDEFNMLWEKQAVYHKELTEELKKEIRDIIIFYQRRLKSQKGLIGFCEFESRQIEVDIDGKKKIKTVGNRVISRSSPLFQEFKIWQILNNIEVTVVGKKRKRRKLKENYSAIFEELNDAEQLELNGSRRLCQEEKELLAQELFVRDKMTKSEVLKLLFDNPQELDLNFKTIDGNKTGYALFQAYSKMIEMSGHEPVDFKKPVEKVVEYIKAVFDLLNWNTDILGFNSNEELDNQSYYKLWHLLYSFEGDNTPTGNGRLIQKMTELYGFEKEYATILANVSFQDDYGSLSAKAIHKILPHLKEGNRYDVACVYAGYRHSESSLTREEIANKVLKDRLMLLPKNSLHNPVVEKILNQMVNVINVIIDIYGKPDEIRVELARELKKNAKEREELTKSIAQTTKANEEYKTLLQTEFGLTNVSRTDILRYKLYKELESCGYKTLYSNTYISREKLFSKEFDIEHIIPQARLFDDSFSNKTLEARSVNIEKGNKTAYDFVKEKFGESGADNSLEHYLNNIEDLFKSGKISKTKYNKLKMAEQDIPDGFIERDLRNTQYIAKKALSMLNEISHRVVATSGSVTDKLREDWQLIDVMKELNWEKYKALGLVEYFEDRDGRQIGRIKDWTKRNDHRHHAMDALTVAFTKDVFIQYFNNKNASLDPNANEHAIKNKYFQNGRAIAPMPLREFRAEAKKHLENTLISIKAKNKVITGNINKTRKKGGVNKNMQQTPRGQLHLETIYGSGKQYLTKEEKVNASFDMRKIETVSKSAYRDALLKRLYENDNDPKKAFAGKNSLDKQPIWLDKEQMRKVPEKVKIVTLEAIYTIRKEISPDLKVDKVIDVGVRKILIDRLNEYGNDAKKAFSNLDKNPIWLNKEKGISIKRVTISGISNAQSLHVKKDKDGKPILDENGRNIPVDFVNTGNNHHVAVYYRPVIDKRGQLVVDEAGNPKYELEEVVVSFFEAVTRANLGLPIIDKDYKTTEGWQFLFSMKQNEYFVFPNEKIGFNPKEIDLLDVENYGLISPNLFRVQKFSLKNYVFRHHLETTIKDTSSILRGITWIDFRSSKGLDTIVKVRVNHIGQIVSVGEY

SEQ ID NO: 75 - protein, 1517 aa, Bacteroides sp. 20_3
MKKIVGLDLGTNSIGWALINAYINKEHLYGIEACGSRIIPMDAAILGNFDKGNSISQTADRTSYRGIRRLRERHLLRRERLHRILDLLGFLPKHYSDSLNRYGKFLNDIECKLPWVKDETGSYKFIFQESFKEMLANFTEHHPILIANNKKVPYDWTIYYLRKKALTQKISKEELAWILLNFNQKRGYYQLRGEEEETPNKLVEYYSLKVEKVEDSGERKGKDTWYNVHLENGMIYRRTSNIPLDWEGKTKEFIVTTDLEADGSPKKDKEGNIKRSFRAPKDDDWTLIKKKTEADIDKIKMTVGAYIYDTLLQKPDQKIRGKLVRTIERKYYKNELYQILKTQSEFHEELRDKQLYIACLNELYPNNEPRRNSISTRDFCHLFIEDIIFYQRPLKSKKSLIDNCPYEENRYIDKESGEIKHASIKCIAKSHPLYQEFRLWQFIVNLRIYRKETDVDVTQELLPTEADYVTLFEWLNEKKEIDQKAFFKYPPFGFKKTTSNYRWNYVEDKPYPCNETHAQIIARLGKAHIPKAFLSKEKEETLWHILYSIEDKQEIEKALHSFANKNNLSEEFIEQFKNFPPFKKEYGSYSAKAIKKLLPLMRMGKYWSIENIDNGTRIRINKIIDGEYDENIRERVRQKAINLTDITHFRALPLWLACYLVYDRHSEVKDIVKWKTPKDIDLYLKSFKQHSLRNPIVEQVITETLRTVRDIWQQVGHIDEIHIELGREMKNPADKRARMSQQMIKNENTNLRIKALLTEFLNPEFGIENVRPYSPSQQDLLRIYEEGVLNSILELPEDIGIILGKFNQTDTLKRPTRSEILRYKLWLEQKYRSPYTGEMIPLSKLFTPAYEIEHIIPQSRYFDDSLSNKVICESEINKLKDRSLGYEFIKNHHGEKVELAFDKPVEVLSVEAYEKLVHESYSHNRSKMKKLLMEDIPDQFIERQLNDSRYISKVVKSLLSNIVREENEQEAISKNVIPCTGGITDRLKKDWGINDVWNKIVLPRFIRLNELTESTRFTSINTNNTMIPSMPLELQKGFNKKRIDHRHHAMDAIIIACANRNIVNYLNNVSASKNTKITRRDLQTLLCHKDKTDNNGNYKWVIDKPWETFTQDTLTALQKITVSFKQNLRVINKTTNHYQHYENGKKIVSNQSKGDSWAIRKSMHKETVHGEVNLRMIKTVSFNEALKKPQAIVEMDLKKKILAMLELGYDTKRIKNYFEENKDTWQDINPSKIKVYYFTKETKDRYFAVRKPIDTSFDKKKIKESITDTGIQQIMLRHLETKDNDPTLAFSPDGIDEMNRNILILNKGKKHQPIYKVRVYEKAEKFTVGQKGNKRTKFVEAAKGTNLFFAIYETEEIDKDTKKVIRKRSYSTIPLNVVIERQKQGLSSAPEDENGNLPKYILSPNDLVYVPTQEEINKGEVVMPIDRDRIYKMVDSSGITANFIPASTANLIFALPKATAEIYCNGENCIQNEYGIGSPQSKNQKAITGEMVKEICFPIKVDRLGNIIQVGSCILTN

SEQ ID NO: 76 - protein, 1424 aa, Bacteroides sp. 3_1_19
MKRILGLDLGTNSIGWALVNEAETDEEVSSIIRLGVRVNPLTVDETQNFEKGKSITTNAERTLKRSMRRNLQRYKLRRDALVEFLKELGFITDETILSEQGNRTTFETCRLRAKAAEEEISLEELSRVLLMINKKRGYKSSRKVKKEEDGVLIDGMEIAKKLYEEDLTPGQLCSQLLESGKKVLPDFYHSDLQEELDRIWSVQKQFHPDVFCDAAKEEIKGKNRSQTWAILANYFVWKEEVVGWNDREAKNETIEKECKLVGLKRTTKGYELKKENYRWRAQALTEQLGLEEIAVVLQEINGQINASSGYLGAISDRSKVLYFNHQTVGQYQMAELDKNPHASLRNMVFYRQDYLDEFDRIWEKQAEFHKELTAELKKEIRDMIIFYQRRLKSQKGLISFCEFERLEIVVEKDGKKQTKVIGCKVIPRSHPLFQEFKVWQTLNDIKVLGREKKRNALSASESRALYPEEKEILARELAIKENMKKADVLKLLFENPQELDLNFKQIDGNRTGFSLFSAYSKMIEKYGYEPLDFKKPADEIIGQLRTIFTDLGWNTNLFTIDLTKEGKELEMQPYFRLWHLLYSFEGDNTSTGNGKLIEKIMQLCGVEKEYAVELASLSFQDDYGSLSAKAIKRILPYLKEGNLYDVACEYAGYRHSKSSLTKEEIENKVLKGKLEVLPKNSLRNPVVEKILSQMVNVINTIIDTYGKPDEIRVELARELKKSAKEREELTKAIAKSTREHEEIRKLLQDEFGMMNVSRNDIIRYKLYEELKDNGYKTLYSNQYIPKEKIFSKEIDIEHIIPQSRLFDDSLSNKTLEYKAINIEKGNKTAYDFVKEKYGEEGLQQYINRCESLFNDKKAKLRKLKMEQKDIPDGFIDRDLRNTQYIAKKALAMLNEICRRVVATTGSITDQLREDWQLVDVMKELNLPKYEALGFVETYEDKDGRKIKRIKDWTKRNDHRHHAMDALTVAFTKDAFIQYFNNKNAAQDSGNRNHTNIIGIKTRYFDKGRALPPIPLEQFRIEAKQHLEKLLVSIKAKNKVVTVNVNRTKKRKGENTKIQQTPRGQLHLETVYGSHKQYVTKIEKVNASFDAAKIATVSKRAYRNALLKRLETFGNDPKKAFTGKNALEKNPLYADKYQTIRVPEKVQTVEFETIYTIRKPVDPALNVDKVVDVKVRAILERRLKEYGGDPKKAFVNFWENPIWLNKEKGISIKRVSIRGINNAQSIHVKKDKNGNPIWDENGKQIPVDFVNTGNNHHVAIYRKPVLDKKGQVTFDEDGNLMYELDEVVVPFFEAVTRANLGLPIIDKDYRKSEGWQFLFSMKQNEYFVFPNEKTGFNPKEVDLLNPDNYAMISPNLFRVQTMSKVMYGNNVVRDYKFRHHLETTVKDMKELKDIAYKQYKTLSFGNSVVKIRINHIGQIVSVGEY

SEQ ID NO: 77 - protein, 1510 aa, Bacteroides sp. D2
MKRILGLDLGTNSIGWALVDSEEQRILGMGSRIIPMDQGVLDTFSGGNPVETQTAARTAYRGTRRLRERALLRRERLIRVLNMMKFLPEHYASQIDFEKRLGQFFDEKEPKLAWKQNDEGRFEFIFQQSFNEMIEEFKNKGVVREDKKIPYDWTIYYLRKKALSQEIEKEELAWILLNFNQKRGYYQLRGEEEEENPNKLVEYYSLKIVDVIADEKPNSKGDIWYSLHLENGWIYRRSSKIPLFGWKDKTRDFIVTTDLNDDGTVKKDKEGIEKRSFRAPSENDWVLLKKKTESDIEKSHKTVGAYVYETLLQNPMQKVRGKLVRTIERKFYKDELKQILEKQREFHPELRDEDLYNDCVRELYRSNETYQFILSKRDFVHLFLDDILFYQRPLRSQKSAIGDCILEFKTYKDKDGNNIKEYLKVISKSNPLYQEFRIWQWLYNLKIYRKEDDEDVTLQFIANIEDKEQLFDFLSNRKSIEQKPLLEYLIKAKGLKKQVKTEAYRWNYVEDKIYPCSETKTMISTRLAKVENIPDNFFTKEIEQKLWHIIYSVTDKNEFEKALRTFAKKYDLDIASFVDNFKKIPPFKNEYGSFSEKAIKKLLPLMRLGKYWKWNDIDNNTQNRISKIITGEYDEEIKDIVREKSIALTNENDFQGLQLWLAQYLVYGRHSEADIAGKWHSVADLEKYLNEFKQHSLRNPIVEQIITETLRVVRDIWRKYGQGAENFFSEIHVELGRDMKNTADERKKIVNVVTENENTNLRIKALLMELKNNSDGKLEVENVRPYSPTQQDILKIYEEYAISTGLDNEKDEKVKEDIKKISRVAQPTTTELQRYKLWLEQKYCSPYTGKVIPLGKLFTEEYQIEHIIPKSRYYDDSFSNKVICEAAVNKLKDKCLGLEFIKNYHGQIVETGFGQKVTIFDEEAYQNFVKQHYAYNRSKRTKLLLEEIPEKMIERQMNDTRYISKFVLPLLSNLVRAEENDNGVNSKNVLPVNGKITTMLKQDWGLNDVWNDLILPRFVRMNELAKTIAFTSWNEQHQKYLPTVPLELSKGFQKKRIDHRHHAMDALVIACATRDHVNLLNNKHANTDTIRYDLQRKLRLFERVTYIDPQTKNNVTKDIPKEFKKPWDNFTVDARNELEKIIVSFKQNLRIINKATNIYTKYENGKKIKVGQKGLNWAIRKPLHKETVFAKVSLRKRKTVRLSEALKDWKKIVDKKLKQEIKRLTCQYGKFDVDTILRYFKDRKYQFGEVDVSKVKMYYFDEENAAVRKNVDTSFTEKFIQGSVTDTGIQKILLNHLEAKGNKVEIAFSPEGIEEMNKNIIQLNEGKLHLPIFKVRVYETIGNKFSVGVKGNKKDKYVEAAKGTNLFFAIYVDENGIRSYETIPLNIVIERLKQGLSVVPEKNRKEHSLLFYLSPNDLVYVPIEDERENIHAVNLDQLNNEQRKRIYKMVSCTGSECHFVPYYVASPIVNKVEYSSLNKIGRSLTGEMIKDVCIKLKVDRLGNVKGISGL

SEQ ID NO: 78 - protein, 1436 aa, Bacteroides sp. D2
MKRILGLDLGTNSIGWALVDEAENKDERSSIVKLGVRVNPLTVDELTNFEKGKSITTNADRTLKRGMRRNLQRYKLRRETLMEVLKEHKLITEDTILSENGNRTTFETYRLRAKAATEKISLEEFARVLLMINKKRGYKSCRKAKGAEEGTLIDGMDIARELYNNNLTPGELCLQLLDAGKKYLPDFYRSDLQNELDRIWEKQKEYYPEILTEVLKEELRGKKRDAVWAICAKSFVWEEYYTEWNKEKGKTEQQEREHKLEGIYSKRKRDEAKRENLQWRVNGLKEKLSLEQLVIVLQEMNIQINNSSGYLGAISDRSKELYFNKQTVGQYQMEMLDKNPNASLRNMVFYRQDYLDEFNTLWEKQAEYHKELTGELKKEIRDIVIFYQRRLKSQKGLVGFCEFESRQIEVEIDGKKKIKTVGNRVIPRSSPLFQEFKIWQILNNIEVTVVGKKGKRRKQKDNSPTLFDGLDDTEQLELNGSRYLYQEEKELLAQELFVRDKMTKSDVLKLLFDNPQELDLNFKTIDGNKTGYTLFQAYSKMIEMSGHEPVDFKKTVEKVVEHVKAVFDLLNWNTDILGFNSNEELDNQSYYKLWHLLYSFEGDNTPTGNARLVQKITELYGFEKEYAIILANVTFQDDYGSLSAKAIHKILPHLKEGNRYDVACAYAGYKHSESSLTKEEIANKALKDRLTLLPKNNLRNPVVEKILNQMVNVINAIIDTYGKPDEIRVELARELKKNAKEREELTKFIAETTRKHEEFKILLQSEFGLTNVSRTDILRYKLYKELESCGYKTLYSNTYIPREKLFSKEFDIEHIIPQARLFDDSFSNKTLEARSINLEKGNKTAYDFVKEKFGESGADNSLDHYLNNIEDLFKSGKISKTKYNKLKMAEQDIPDGFINRDLRNTQYIAKKALSMLNEISRRVVATSGTITDKLRQDWQLVDVMKELNWEKYKALGLVEYFEDKDGRQIGRIKDWTKRNDHRHHAMDALTVAFTKDIFIQYFNNKNASLNSNTNEYAIKNKYFQNGRAIAPIPLREFRVEAKKHLENTLISIKAKNKVVTGNINKTKKRGGVNKYLQQTPRGQLHLETIYGSGKQYLTKEEKVNASFDMKKIATVSKSAYRDVLLKRLHENDNDPKKAFTGKNSLDKQPIWLDKEQTRKVPEKVKTVTLETIYTVRKEISPDLKVDKVIDAGVRKILTGRLNEYGNDAKKAFSNLDENPIWLNKEKGISIKRVTISGISNAQSLHVKKDKDGKPILDEDSRNIPVDFVNTGNNHHVAVYRRPVIDKRGQLVIDEAGNPKYELEEVVVSFFEAVTRANLGQPIIDKDYKTSEGWQFLFSMKQNEYFVFPNEKTGFNPKEIDLLDAENYGVISPNLFRVQKFAHKNYVFRHHLETTIKDTSSILKGITWIDFRSSKGLDAIVKVRVNHIGQIVSVGEY

SEQ ID NO: 79 - protein, 1508 aa, Bacteroides uniformis CL03T00C23
MRTILGLDLGTNSIGWAVINSVIKEQTERIWIEMAGSRIIPMDAAILGDFDKGNSISQTAERTRFRGVRRLRERQLLRRERLHKVLKILGFLPEHYLKGIDFEKHTGKFLSGSEPKLPWVKDRWGKYSFLFQTAFNEMLADFAKHQPSLVFDGKKIPYDWTVYYLRKKALTEMISKEELAWILLNFNQKRGYYQLRGEEEEDNAGKSVEFYALKVLSVEATDEKKGRDIWYNVHLENGWVYRRSSNVPLDWEGRVKEFIVTTDLNPDGTPKLDKYGEVKRSFRAPKEDDWMLIKKRTEADITGTHKTIGSYIYDALLQEPQQKIIGKLVKTVERKFYKEELNFILQKQCAFHAELQDRDLYMRCIEALYPGNEVQRRNIANRDFIYLLIDDVLFYQRPLKTKKSLIANCPYEENEYVNRKTGEIKTAPLKCIAKSHPLFQEFRLWYFLSNIRVYQKEREVNGTLHLDVDVTTEFLKTEDDYVALFDWLNSRKEIDQKAFLRYPAFGLKKEINNYRWNYVEDKFYPCNETRHAILSRLEKAGIGIDFLSDEKETALWHILYSVSDKQEIEKALATFAVKNGLNESFVEVFKKFPPFKSEYGAYSAKAIKKLLPLMRCGKYWDMSLIDGTTKERIERIIAGECDESIGAKVREKAMNLSDISCFKRLPLWLACYVVYNRHSEDKEITKWETPADIDAYLAAFKQHSLRNPIVEQVITETLRVVRDIWKQVGKIDEIRIELGREMKNPADKRKRMTTQILENENANLRIKALLAEFVNPEYGVENVRPYSPSQQEILRIYEDAVLKGEEQIPEDIDVILKKFNTSKLPTKSEFLRYKLWLEQKYRSPYTGELIPLAKLFTAAYEIEHVIPQSRYFDDSFSNKVICESAVNKLKDNQLGYEFIKNHHGQKVEVGFGKTVEIFSVDSYERFVKEQYAKSGIKMKKLLMDDIPEQFIERQLNDSRYISKVVKGLLSNIVREKNDSGEYEPEAVSKNILVCTGSVTDRLKKDWGMNDVWNSIVSPRFERLNALTETQCFGHWENKDGKKVFQTAVPLEYQKGFSKKRIDHRHHAMDAIVIACATRNHVNYLNNESASRNAKISRYDLQRLLCDKSRGDGNGNYRWIIKKPWTTFTQDAREALSGIIVSLKQNLRIINKTTNIYQHFDANGTRVYEKQKIGDSWAIRKPMHKDTVFGAVNLRKVKVVRLSVALDTPSMIVNKRVKNKVLELLSYKYDKKKIEKYFKENAFLWKELDIAKVAVYYFTENTTEPLVAVRKSLDSTFNEKKIASVTDTGIQKILLNHLKSKEGKAELAFSAEGIEEMNRNLLQLNDGKGHQPIYKVRVYEPRGNKFKVGVLGNKGAKWVEAAKGTNLFFAIYITEDGNRTYETIPLNWVIEREKQGLVPVPDRNEKGDKLLFWLSPNDLVYLPTEEERDFGRINEPIDRGRIYKMVSSSGNQCFFIPQSISNAIISTKELGSNNKAEKSWDGEMIKNICIPVKVDRLGRIIEVKYRVNE

SEQ ID NO: 80 - protein, 1504 aa, Bacteroides vulgatus CL09T03C04
MKNIVGLDLGTNSIGWAVVNGSVNDDGSEQLVKIQASGSRIIPMDAAMIGDFNKGNSISQTAERTRLRGVRRLSERYLLRRERLHRILDILGFLPFHFAQDLDRHGKIVKGKEPKLAWRKNEAGQFEFIFQDSFKEMLEDFKLNHPNLITDDKKVPYDWTIYYLRKKGLTSKISKEELAWILLNFNQKRGYYQLRGEEEEENKNKLVEFYALKVVAVEDSGEKKGKDIWYNVHLENGWVYRRTSNMPLDWVGKTKEFIVTTDLEKDGTPKKDKEGNVKRSFRAPKEDDWSLLKKKTEADIDQTHKTVGVYIYDTLLGNPSQKIRGRLVRTIERKYYKEELKQILEKQKEFHLELQDRALYAACIEELYPINEAHRNNVGNRDFTYLFLEDILFYQRPLKSKKSLIDNCPYEENQGLDKETGEIKSFPVKCIAKSHPLFQEFRLWQFIVNLRIYRKDLAQDVDVTNELLKTEEDYVALFDWLNGKKEIDQKAFLKYPVFGLKKEIENYRWNYVQDKPYPCNETRSLMLARLEKCDISIEFLTKENEEALWHILYSVEDKNEIVKALQKFADKHDLNASFVDVFQKFPPFKKEYGSYSAKAIKKLLPLMRMGKYWSENSIDKGTRERIDKIITGEYDEKIENRVREKAIHLADVSDFKGLPLWLVCYIVYGRHSEAKEITQWKSPADIDSYLRSFKQHSLRNPIVEQIIIETLRVVRDIWKQVGNIDEIHVELGREMKNPADKRKKMTQQMSENENTNLRIKYLLTEFLNPEYEVENVRPYSPSQQDILRIYEEGVLNSVSDLPEEISDILKKFTETDLKKRPSRSEILRYKLWLEQKYRSPYTGEVIPLGKLFTPAYEIEHVIPQSCYFDDSFSNKVICEAEVNKLKSNLLGHEFIVKHHGEIVELPFGKKVRIFTVDEYEQFVKDNYSRTRSKMKKLLMDDIPEEFVTRQLNDSRYISKVVKSLLSNIVREKGEEEAISKNVIPCTGGVTDRLKKDWGINEVWNKIILPRFQRLNELTGTNKFTTKNVGIQEIPTMPLELQKGFNKKRIDHRHHAMDAIIIACANRNIINYLNNESATAKAELSRYDLQKMLCDKAKTDNNGNYKWVIRKPWASFTQDTYLALENIIVSFKQNLRVINKATNRFLHYNEEGKKIFVKQGKGDNWAIRKSMHKDTVFGEVNLRRIKTVALNEAMKNPQSIVVKDFKRKLLELWNLGFDAKRIKKYFEDNRETWSDINLSKIEVYYFSKDTKDRFFATRKPLDTSFDRKKIENNITDTGIQKILLRHLELKDNNPDIAFSPDGIDEMNRNIIQLNNGKYHQPIIKIRWYEQADKFAVGQTGNKFSKFVEAAKGTNLFFAVYESNILDKKTNTIIKKRNYATIPLNVAIERQKQGLPVAPEDENGNDPIFVLSPNDLVYLPTDDELANGIIAQPLDRGRIYKMVSCTGNEGHFIPARIANPILQTIELGSNNKAQKAWTDEMIKEICMPIKVDRLGNVLESSSSYKK

SEQ ID NO: 81 - protein, 1434 aa, Bacteroidetes oral taxon 274 str. F0058
MKNILGLDLGTNSIGWAYVKQAQNDSEKSEIAELGVRVNPLTVDEKTNFEKGKPISTNADRTLKRGARRNLQRYKLRRQELIELLKDYQVISDKTILAEDGKETTFETLRLRVKSAKEQVSLEELARILLMINKKRGYKSSRKAKNEDEGQLIDGMEIARRLYDENLTTGQLSLQLLKEGKKSLPDYYRSDLQHELDKVWNFQKQFHPDILTDEFYTSIQGKGQKATRESFSSKYGIDTAENKGSREEKKLQAYQWRADATHKELTKEELAFVITEINNNINNSSGYLGAISDRSKELIFANETVGEYLWKQIQNDPHTSLKNQVFYRQDYFDEFERIWETQSGFYPQILTESLKNELRDILIFYQRKLKSQKALVSICEFESKEIPLKDKQGNPISKNGIPVTKLVGPKVAPKSSPLFQEFKIWQNLNNVLVRPKGSRKRKVTTNQQSTLLEGQEPVFELNLEQKELLFEELNLKGNLKTDYCLELIGYSAKEWEMNYPTLEGNKTNKALYEAYLKIIDSEGYDAKKLLKVKTDKDDINLDDIKVSASEIKTMISDIFNELGINTKILDFDAELERKQFEAQASYRLWHLLYSYEGDDSKSGNELLYRLLEDKFGFKREHSKTLANVSLLSDYGNLSTKAIRTIYPYIKENKFSTACELAGYRHSKLSISKEENENRTLKDTLDVLKKNSLRQPVVEKILNQMINLINELIEKHSEKDEKGNIVKYFKFDEIHIELARELKKNAEERRELDSKVREGKDRNEKIITILKSEFGLPYPTKNDITRYRLYEELKDNGYKDLYTNTYIPREKLFSKEIDIEHIIPKSRLFNDSFSNKTICYRQDNLNKGERTAYDYIEGLGKTQLDEYLNRVENLYTNKFITKAKYRNLLKKESEIGDGFIERDLRETQYIAKKAKEMLLQITRHVVSTTGSITDRLRDDWELVNVMRELNLPKYKVLGLTEIQERKNGQTVEVITDWTKRNDHRHHAMDALTVAFTKHSHIQYLNFLNARKDEKHKEYSNIMGIQQLETEKTTDKDGKDRRVFKTPIPNFRQVAKEHLESILISHKTKNKVVTRATNKIAGSKKQQETLSPRGQLHKETVYGKYRRYVQKEEKIGSKFDLQTIERVANPLYKRLLTKRLEENGGDPKKAFTGKNALAKSPIYLDETQTQQLPEKVKLVWLETDFSIRKDITPDNFKDEKSIDKVLDEGIKRILKDRLKSFDGDAKRAFTDLEQNPIWLNKEKGIAIKRVTISGVSNAEPLHTKKDHLGNEIFDDTGKPIPVDYVSTGNNHHIAIYRDENGNLQEKAVSFFEAVTRANQGLPTVDKTYNQHLGWQFLFTMKQNEMFVFPNKETGFDPQEIDLLDPKNKKLISPNLFRVQKISTKNYFFRHHLETSVETHNALNGVTYKSQLGLNGITDIIKVRINHLGDIVHIGEY

SEQ ID NO: 82 - protein, 1153 aa, Barnesiella intestinihominis YIT 11860
MKNILGLDLGLSSIGWSVIRENSEEQELVAMGSRVVSLTAAELSSFTQGNGVSINSQRTQKRTQRKGYDRYQLRRTLLRNKLDTLGMLPDDSLSYLPKLQLWGLRAKAVTQRIELNELGRVLLHLNQKRGYKSIKSDFSGDKKITDYVKTVKTRYDELKEMRLTIGELFFRRLTENAFFRCKEQVYPRQAYVEEFDCIMNCQRKFYPDILTDETIRCIRDEIIYYQRPLKSCKYLVSRCEFEKRFYLNAAGKKTEAGPKVSPRTSPLFQVCRLWESINNIVVKDRRNEIVFISAEQRAALFDFLNTHEKLKGSDLLKLLGLSKTYGYRLGEQFKTGIQGNKTRVEIERALGNYPDKKRLLQFNLQEESSSMVNTETGEIIPMISLSFEQEPLYRLWHVLYSIDDREQLQSVLRQKFGIDDDEVLERLSAIDLVKAGFGNKSSKAIRRILPFLQLGMNYAEACEAAGYNHSNNYTKAENEARALLDRLPAIKKNELRQPVVEKILNQMVNVVNALMEKYGRFDEIRVELARELKQSKEERSNTYKSINKNQRENEQIAKRIVEYGVPTRSRIQKYKMWEESKHCCIYCGQPVDVGDFLRGFDVEVEHIIPKSLYFDDSFANKVCSCRSCNKEKNNRTAYDYMKSKGEKALSDYVERVNTMYTNNQISKTKWQNLLTPVDKISIDFIDRQLRESQYIARKAKEILTSICYNVTATSGSVTSFLRHVWGWDTVLHDLNFDRYKKVGLTEVIEVNHRGSVIRREQIKDWSKRFDHRHHAIDALTIACTKQAYIQRLNNLRAEEGPDFNKMSLERYIQSQPHFSVAQVREAVDRILVSFRAGKRAVTPGKRYIRKNRKRISVQSVLIPRGALSEESVYGVIHVWEKDEQGHVIQKQRAVMKYPITSINREMLDKEKVVDKRIHRILSGRLAQYNDNPKEAFAKPVYIDKECRIPIRTVRCFAKPAINTLVPLKKDDKGNPVAWVNPGNNHHVAIYRDEDGKYKERTVTFWEAVDRCRVGIPAIVTQPDTIWDNILQRNDISENVLESLPDVKWQFVLSLQQNEMFILGMNEEDYRYAMDQQDYALLNKYLYRVQKLSKSDYSFRYHTETSVEDKYDGKPNLKLSMQMGKLKRVSIKSLLGLNPHKVHISVLGEIKEIS

SEQ ID NO: 83 - protein, 1352 aa, Belliella baltica
MKKILGLDLGTTSIGWAFIKEPEKDVVGSEIVDMGVRIVPLSSDEENDFAKGNTISINADRTLKRGARRNLQRFKQRRNALLEIFKEKKLISTNFKYAEDGPSSTFSTLNLRAKAAKEKIELQDLVKVLLQINKKRGYKSSRKAKSEEDDGSAIDSMGIAKELYENDLTPGQWVYEALQKGRKNVPDFYRSDLQEEFKKIVNYQSEFFPDIFNASFVEDWMGKASTPTKQYFNKKGVQLAENKGKREERRLQEYKWRAEAVNFKIDLSEIALILSQINSQISNSSGYLGAISDRSKELYFKNLTVGQYLYQQIKKNPHTRLKGQVFYRQDYLDEFERIWSVQSSFYPQLNDALKREVRDITIFFQRRLKSQKHLISNCEFEDHHKVVPKSHPVFQEFRIWQNLNNLLLIKKDNLNEKFDLELESKIALANELAFKRELNVKDALKILGLKPNEWEFNFTKIEGNRTNQAFFDAFAKIIELEDGEPIDLGDLKADDILDQFSEAFLRIGIDTELLQVNSDIEGAEYEKQSYIQFWHLLYSSEDDQKLKLNLIRKFGFKPEHAKILASISLQDDHASLSSRAIKKILPHLQSGLIYDKACTYAGYNHSSSFTKDENEKRELRAELELLKKNSLRNPVVEKILNQMINVVNAILKDPELGRPDEIRVEMARELKANAEQRKNMTSNIASATRDHDKYREILKSEFGLKRVTKNDLLRYKLWLETDGISLYTGKPIEASKLFSKEYDIEHIIPKARLFDDSFSNKTICERQLNIDKANVTAFSFLQNKLSADEFEQYQSRVKSLYGKLSKAKIQKLLMANDKIPEDFIARQLQETRYISKKAKEILFEISRRVSVTTGTITDKLREDWGLVEIMKELNWEKYDKLGLTYTIEGKHGERLNKIKDWSKRNDHRHHAMDALTVALTKPAYIQYLNNLNAKGLNNKKGTEVFAIEQKYLKRENGKLCFIPPIENIRSEAKKHLSRILVSYKAKNKVVTINKNKTKSKAGLNEQIALTPRGQLHKETVYGKSFHYSTKFEKIGASFNVQKINTVAKKEEREALLKRLAENGNDPKKAFTGKNTLNKMPIYLDLGKNIKLSEKVKTVVLEQNYTIRKNIDPDLKVDKVIDVGIKRILESRLEEFGGNAKLAFSNLEENPIWLNKEKGISIKRVKISGVSNVESLHVKKDHFGEPILDQEGNEIPVDFVSTGNNHHVAIYEDENGNLQEEVVSFFEAVVRQNQGLPIIKKNHTLGWKFLFTLKQNEYFVFPSDDFVPADVDLMDEQNYHLISPNLFRVQKIARKNYVFNNHLETKAVDNDLLKSKKELSKITYHFYQTPEHLRGIIKIRINHLGKIIQIGEY

SEQ ID NO: 84 - protein, 1415 aa, Bergeyella zoohelcum ATCC 43767
MKHILGLDLGTNSIGWALIERNIEEKYGKIIGMGSRIVPMGAELSKFEQGQAQTKNADRRTNRGARRLNKRYKQRRNKLIYILQKLDMLPSQIKLKEDFSDPNKIDKITILPISKKQEQLTAFDLVSLRVKALTEKVGLEDLGKIIYKYNQLRGYAGGSLEPEKEDIFDEEQSKDKKNKSFIAFSKIVFLGEPQEEIFKNKKLNRRAIIVETEEGNFEGSTFLENIKVGDSLELLINISASKSGDTITIKLPNKTNWRKKMENIENQLKEKSKEMGREFYISEFLLELLKENRWAKIRNNTILRARYESEFEAIWNEQVKHYPFLENLDKKTLIEIVSFIFPGEKESQKKYRELGLEKGLKYIIKNQVVFYQRELKDQSHLISDCRYEPNEKAIAKSHPVFQEYKVWEQINKLIVNTKIEAGTNRKGEKKYKYIDRPIPTALKEWIFEELQNKKEITFSAIFKKLKAEFDLREGIDFLNGMSPKDKLKGNETKLQLQKSLGELWDVLGLDSINRQIELWNILYNEKGNEYDLTSDRTSKVLEFINKYGNNIVDDNAEETAIRISKIKFARAYSSLSLKAVERILPLVRAGKYFNNDFSQQLQSKILKLLNENVEDPFAKAAQTYLDNNQSVLSEGGVGNSIATILVYDKHTAKEYSHDELYKSYKEINLLKQGDLRNPLVEQIINEALVLIRDIWKNYGIKPNEIRVELARDLKNSAKERATIHKRNKDNQTINNKIKETLVKNKKELSLANIEKVKLWEAQRHLSPYTGQPIPLSDLFDKEKYDVDHIIPISRYFDDSFTNKVISEKSVNQEKANRTAMEYFEVGSLKYSIFTKEQFIAHVNEYFSGVKRKNLLATSIPEDPVQRQIKDTQYIAIRVKEELNKIVGNENVKTTTGSITDYLRNHWGLTDKFKLLLKERYEALLESEKFLEAEYDNYKKDFDSRKKEYEEKEVLFEEQELTREEFIKEYKENYIRYKKNKLIIKGWSKRIDHRHHAIDALIVACTEPAHIKRLNDLNKVLQDWLVEHKSEFMPNFEGSNSELLEEILSLPENERTEIFTQIEKFRAIEMPWKGFPEQVEQKLKEIIISHKPKDKLLLQYNKAGDRQIKLRGQLHEGTLYGISQGKEAYRIPLTKFGGSKFATEKNIQKIVSPFLSGFIANHLKEYNNKKEEAFSAEGIMDLNNKLAQYRNEKGELKPHTPISTVKIYYKDPSKNKKKKDEEDLSLQKLDREKAFNEKLYVKTGDNYLFAVLEGEIKTKKTSQIKRLYDIISFFDATNFLKEEFRNAPDKKTFDKDLLFRQYFEERNKAKLLFTLKQGDFVYLPNENEEVILDKESPLYNQYWGDLKERGKNIYVVQKFSKKQIYFIKHTIADIIKKDVEFGSQNCYETVEGRSIKENCFKLEIDRLGNIVKVIKR

SEQ ID NO: 85 - protein, 1430 aa, Bergeyella zoohelcum CCUG 30536
MKHILGLDLGTNSIGWAVVKEAQNDNEQSEIVDVGVRVNPLTTDEKTNFEKGKPISTNADRTLKRSARRNLQRYKLRRKELIELLKEHQLISTDTILTENGKGTTFQTLELRAKSAKEKISLEELARVFLTINKKRGYKSSRKAKNEDEGQLIDGMEIAKRLYEENLTTGQLSLQLLKEGKKSLPDYYRSDLQFELDKVWNFQKQFHSDILTDEFYAQLKGKGQRATSALFLAKYQIYTAENKGSREDKKLQAYQWRVDALSKELTREQLAFVITEINNNLNNSSGYLGAISDRSKELYFNNETVGEYLWKQIAANPHTSLKNQVFYRQDYLDEFEQIWKTQSAFYPEILTDELKKELRDVVIFYQRKLKSQKSLVSFCEFENKEIEIKKEDGTSTKKVIGLKVAPKSSPLFQEFKIWQNLNNVLIRKKGSKTKKVAKNQQAVLFEEEKTISELDLEAKQALFNELNLKGNLKADYCLEILGYSPKEWEMNYSVLEGNRTNKALYEAYLKITDLEGYDAKNHLKVKLNKDEVELDDLKVPASEIKDMVQAIFKEAGINTDILHFNAELDGKDFENQASYQLWHLLYSYEGDDSKSGNELLYKLLETKFGFKKEYAQILANVSLSDDYGSLSTKAMRKIHPYIKENKFSTACELAGYRHSKHSLTKEENDNRVLKDSLEVLKKNSLRQPVVEKILNQMINLVNALLKKYRTENPNFKFDEIRIELARELKKNAEERANMTANINKAKTEHEKIIKILKNEFGLPNPTRNDIIRYRLYEELKANGYKDLYTNIKIPQEKLFTKEIDIEHIIPKSRVFDDSFSNKTLSFRKTNLDKGERTAFDYMESKFGADKLEEYVARVEDLYKNNIISKAKYQKLLKKESEIGDGFVERDLRETQYIAKKAKEILLQITPNVLSTSGGITDRLREDWDLINVMKELNLPKYRALGLTQMEDRKYGQQVEVITDWTKRNDHRHHAMDALTVAFTKHNHIQYLNYLNARKNEKHKEHSNIMGIQQLETIKVTDKNGNEKRVFKAPMPNFRQVTKAFLENILISHKAKNKVVTKNKNKVAGSNKVQEVLTPRGQLHKETVYGKYQYYVQKEEKIGAKFDLETIKKVANPLYQSLLKKRLEENGGDPKKAFTGKNSLAKNPIYLDDTQTEQLPEKVKLVWLENSFSIRKDITPENFKDEKLIDKILDEGVKRILKERLQSFGNDAKKAFSDLDKNPIWLNKEKGITIKRVTISGVANAEPLHTKKDHLGKEILDKEGKPIPVDFISTGSNHHVAVYRDEKGNLQEKVVSVFEAVVRANQGLPIIDKTYNQHLGWEFLFTMKQNEMFVFPNESTGFNPNDIDLLDPKNKRIISPNLFRVQKFSKLQYGNSFVREFVFRHHLETTVEDRKELQGITYKQMKNSTFFNDIIKVRINHLGDIVSIGEY

SEQ ID NO: 86 - protein, 1420 aa, Bifidobacterium bifidum
MSRKNYVDDYAISLDIGNASVGWSAFTPNYRLVRAKGHELIGVRLFDPADTAESRRMARTTRRRYSRRRWRLRLLDALFDQALSEIDPSFLARRKYSWVHPDDENNADCWYGSVLFDSNEQDKRFYEKYPTIYHLRKALMEDDSQHDIREIYLAIHHMVKYRGNFLVEGTLESSNAFKEDELLKLLGRITRYEMSEGEQNSDIEQDDENKLVAPANGQLADALCATRGSRSMRVDNALEALSAVNDLSREQRAIVKAIFAGLEGNKLDLAKIFVSKEFSSENKKILGIYFNKSDYEEKCVQIVDSGLLDDEEREFLDRMQGQYNAIALKQLLGRSTSVSDSKCASYDAHRANWNLIKLQLRTKENEKDINENYGILVGWKIDSGQRKSVRGESAYENMRKKANVFFKKMIETSDLSETDKNRLIHDIEEDKLFPIQRDSDNGVIPHQLHQNELKQIIKKQGKYYPFLLDAFEKDGKQINKIEGLLTFRVPYFVGPLVVPEDLQKSDNSENHWMVRKKKGEITPWNFDEMVDKDASGRKFIERLVGTDSYLLGEPTLPKNSLLYQEYEVLNELNNVRLSVRTGNHWNDKRRMRLGREEKTLLCQRLFMKGQTVTKRTAENLLRKEYGRTYELSGLSDESKFTSSLSTYGKMCRIFGEKYVNEHRDLMEKIVELQTVFEDKETLLHQLRQLEGISEADCALLVNTHYTGWGRLSRKLLTTKAGECKISDDFAPRKHSIIEIMRAEDRNLMEIITDKQLGFSDWIEQENLGAENGSSLMEVVDDLRVSPKVKRGIIQSIRLIDDISKAVGKRPSRIFLELADDIQPSGRTISRKSRLQDLYRNANLGKEFKGIADELNACSDKDLQDDRLFLYYTQLGKDMYTGEELDLDRLSSAYDIDHIIPQAVTQNDSIDNRVLVARAENARKTDSFTYMPQIADRMRNFWQILLDNGLISRVKFERLTRQNEFSEREKERFVQRSLVETRQIMKNVATLMRQRYGNSAAVIGLNAELTKEMHRYLGFSHKNRDINDYHHAQDALCVGIAGQFAANRGFFADGEVSDGAQNSYNQYLRDYLRGYREKLSAEDRKQGRAFGFIVGSMRSQDEQKRVNPRTGEVVWSEEDKDYLRKVMNYRKMLVTQKVGDDFGALYDETRYAATDPKGIKGIPFDGAKQDTSLYGGFSSAKPAYAVLIESKGKTRLVNVTMQEYSLLGDRPSDDELRKVLAKKKSEYAKANILLRHVPKMQLIRYGGGLMVIKSAGELNNAQQLWLPYEEYCYFDDLSQGKGSLEKDDLKKLLDSILGSVQCLYPWHRFTEEELADLHVAFDKLPEDEKKNVITGIVSALHADAKTANLSIVGMTGSWRRMNNKSGYTFSDEDEFIFQSPSGLFEKRVTVGELKRKAKKEVNSKYRTNEKRLPTLSGASQP

SEQ ID NO: 87 - protein, 1138 aa, Bifidobacterium dentium
MLCRCHRRYRIGIDVGLMSVGLAAIEVDETGFPIRILNIQSVIHDGGIDPQLGKKKSISRKAISGVARRTRRMRRRKVVRLRQLDATLESLGFPIVEPDSLDTWEIWLTRAKLASSYIQDDETRKEDVSIALRHIARHRGWRNPYSNVESLFVDVAPSEQYEELRRKAEEKLGTSLSGNPTSAEIVECILKRQVGEVQLRTRSRKGVNGNAVEKEGLLPTKLMQSDNAAEIRRIFKVQRIDDETGRKLLRAVFKACSPKGSVERRVGRDALAPGLPRALKASLAFQEYRIANVLTNLVISEDGTKRKLTIAEKQRVFGFLSSNETDDITWIDVAEKLGLERRQIQGVGCLTADGEERISSTPPRNITALHIHSAKPVIREKLVAWWKAASPTVRETMVELLSNTVDIDRVREDMDYSSAVAFIDSLGDEELTALDSVDLLSGRAAYSRQTLKQLTERMLNTDDDLHEARKAVFGVDDNWKPPVDAISTSVGNPAVDRVLKIVNRYLLACQKRWRNPQSVQIEHVRESFSSVAKAKETERVQGERARYRNDLRRELCEQEGLNKIRESDIRRWESVQRQNGTCLYCGSPITFRTCEMDHIVPRKGVGSTNTRVNLAAACAACNKLKSNTAFSVWARTEGAANRKVSQRDAIERVKTFIFNKSVPPREQRAFKQAVISRLRQAESDPAIDNRSIESVAWMADELHRRIEAYFNQDADVSGNTPATQVWVFQGRVTALARKASGIEGRIHFAGEWKKTRLDRRHHAVDAAVIAMMNHSAAQTLVERDSLRLSQWITRKPETWKNYPFSEGQKKTRFKEWLDCMNALLDLLNDALDSDRVPVTRCQRMSLGNSQAHAATIRKMKRVELFSPMDADLIRRASTPALYCALTRLPEYSPEKGLPENRGREIVLNGRHIRSTETVDFFASGAAQLMVRNGSAEIGDSIHHMRIYRYRKTGAKSQEYVYGMIRVFQIDLLHASSENLFAVQLPSQSVSVRYGDKNVVQAIQEGRAEYLGHIVPNDEILISYEGVRMKDSEKIGAYANDFSGTASELAQRRHWVVVGSDVSKLALRPSYLSEEGLENSGSESERLSKQTRKVIEGKGWVVAVNILAKYHPVVIRRNALGEPRFRTNSGMPVSWRWDR

SEQ ID NO: 88 - protein, 1187 aa, Bifidobacterium longum
MLSRQLLGASHLARPVSYSYNVQDNDVHCSYGERCFMRGKRYRIGIDVGLNSVGLAAVEVSDENSPVRLLNAQSVIHDGGVDPQKNKEAITRKNMSGVARRTRRMRRRKRERLHKLDMLLGKFGYPVIEPESLDKPFEEWHVRAELATRYIEDDELRRESISIALRHMARHRGWRNPYRQVDSLISDNPYSKQYGELKEKAKAYNDDATAAEEESTPAQLVVAMLDAGYAEAPRLRWRTGSKKPDAEGYLPVRLMQEDNANELKQIFRVQRVPADEWKPLFRSVFYAVSPKGSAEQRVGQDPLAPEQARALKASLAFQEYRIANVITNLRIKDASAELRKLTVDEKQSIYDQLVSPSSEDITWSDLCDFLGFKRSQLKGVGSLTEDGEERISSRPPRLTSVQRIYESDNKIRKPLVAWWKSASDNEHEAMIRLLSNTVDIDKVREDVAYASAIEFIDGLDDDALTKLDSVDLPSGRAAYSVETLQKLTRQMLTTDDDLHEARKTLFNVTDSWRPPADPIGEPLGNPSVDRVLKNVNRYLMNCQQRWGNPVSVNIEHVRSSFSSVAFARKDKREYEKNNEKRSIFRSSLSEQLRADEQMEKVRESDLRRLEAIQRQNGQCLYCGRTITFRTCEMDHIVPRKGVGSTNTRTNFAAVCAECNRMKSNTPFAIWARSEDAQTRGVSLAEAKKRVTMFTFNPKSYAPREVKAFKQAVIARLQQTEDDAAIDNRSIESVAWMADELHRRIDWYFNAKQYVNSASIDDAEAETMKTTVSVFQGRVTASARRAAGIEGKIHFIGQQSKTRLDRRHHAVDASVIAMMNTAAAQTLMERESLRESQRLIGLMPGERSWKEYPYEGTSRYESFHLWLDNMDVLLELLNDALDNDRIAVMQSQRYVLGNSIAHDATIHPLEKVPLGSAMSADLIRRASTPALWCALTRLPDYDEKEGLPEDSHREIRVHDTRYSADDEMGFFASQAAQIAVQEGSADIGSAIHHARVYRCWKTNAKGVRKYFYGMIRVFQTDLLRACHDDLFTVPLPPQSISMRYGEPRVVQALQSGNAQYLGSLVVGDEIEMDFSSLDVDGQIGEYLQFFSQFSGGNLAWKHWVVDGFFNQTQLRIRPRYLAAEGLAKAFSDDVVPDGVQKIVTKQGWLPPVNTASKTAVRIVRRNAFGEPRLSSAHHMPCSWQWRHE

SEQ ID NO: 89 - protein, 1124 aa, Bifidobacterium longum subsp. longum 2-2B
LTGHSGHTFWPTSSSPPIQLEQEKRPLPQRNTSQNGHTFWPITRERCFMRGKRYRIGIDVGLNSVGLAAVEVSDENSPVRLLNAQSVIHDGGVDPQKNKEAITRKNMSGVARRTRRMRRRKRERLHKLDMLLGKFGYPVIEPESLDKPFEEWHVRAELATRYIEDDELRRESISIALRHMARHRGWRNPYRQVDSLISDNPYSKQYGELKEKAKAYNDDATAAEEESTPAQLVVAMLDAGYAEAPRLRWRTGSKKPDAEGYLPVRLMQEDNANELKQIFRVQRVPADEWKPLFRSVFYAVSPKGSAEQRVGQDPLAPEQARALKASLAFQEYRIANVITNLRIKDASAELRKLTVDEKQSIYDQLVSPSSEDITWSDLCDFLGFKRSQLKGVGSLTEDGEERISSRPPRLTSVQRIYESDNKIRKPLVAWWKSASDNEHEAMIRLLSNTVDIDKVREDVAYASAIEFIDGLDDDALTKLDSVDLPSGRAAYSVETLQKLTRQMLTTDDDLHEARKTLFNVTDSWRPPADPIGEPLGNPSVDRVLKNVNRYLMNCQQRWGNPVSVNIEHVRSSFSSVAFARKDKREYEKNNEKRSIFRSSLSEQLRADEQMEKVRESDLRRLEAIQRQNGQCLYCGRTITFRTCEMDHIVPRKGVGSTNTRTNFAAVCAECNRMKSNTPFAIWARSEDAQTRGVSLAEAKKRVTMFTFNPKSYAPREVKAFKQAVIARLQQTEDDAAIDNRSIESVAWMADELHRRIDWYFNAKQYVNSASIDDAEAETMKTTVSVFQGRVTASARRAAGIEGKIHFIGQQSKTRLDRRHHAVDASVIAMMNTAAAQTLMERESLRESQRLIGLMPGERSWKEYPYEGTSRYESFHLWLDNMDVLLELLNDALDNDRIAVMQSQRYVLGNSIAHDATIHPLEKVPLGSAMSADLIRRASTPALWCALTRLPDYDEKEGLPEDSHREIRVHDTRYSADDEMGFFASQAAQIAVQEGSADIGSAIHHARVYRCWKTNAKGVRKYFYGMIRVFQTDLLRACHDDLFTVPLPPQSISMRYGEPRVVQALQSGNAQYLGSLVVGDEIEMDFPVSMLMVRLASIYNSSRSLVEGTLHGNIGLLMDSLTRRS

SEQ ID NO: 90 - protein, 1138 aa, Bifidobacterium
MNSVGLAAVEVSDENSPVRLLNAQSVIHDGGVDPQKNKEAITRKNMSGVARRTRRMRRRKRERLHKLDMLLGKFGYPVIEPESLDKPFEEWHVRAELATRYIEDDELRRESISIALRHMARHRGWRNPYRQVDSLISDNPYSKQYGELKEKAKAYNDDATAAEEESTPAQLVVAMLDAGYAEAPRLRWRTGSKKPDAEGYLPVRLMQEDNANELKQIFRVQRVPADEWKPLFRSVFYAVSPKGSAEQRVGQDPLAPEQARALKASLAFQEYRIANVITNLRIKDASAELRKLTVDEKQSIYDQLVSPSSEDITWSDLCDFLGFKRSQLKGVGSLTEDGEERISSRPPRLTSVQRIYESDNKIRKPLVAWWKSASDNEHEAMIRLLSNTVDIDKVREDVAYASAIEFIDGLDDDALTKLDSVDLPSGRAAYSVETLQKLTRQMLTTDDDLHEARKTLFNVTDSWRPPADPIGEPLGNPSVDRVLKNVNRYLMNCQQRWGNPVSVNIEHVRSSFSSVAFARKDKREYEKNNEKRSIFRSSLSEQLRADEQMEKVRESDLRRLEAIQRQNGQCLYCGRTITFRTCEMDHIVPRKGVGSTNTRTNFAAVCAECNRMKSNTPFAIWARSEDAQTRGVSLAEAKKRVTMFTFNPKSYAPREVKAFKQAVIARLQQTEDDAAIDNRSIESVAWMADELHRRIDWYFNAKQYVNSASIDDAEAETMKTTVSVFQGRVTASARRAAGIEGKIHFIGQQSKTRLDRRHHAVDASVIAMMNTAAAQTLMERESLRESQRLIGLMPGERSWKEYPYEGTSRYESFHLWLDNMDVLLELLNDALDNDRIAVMQSQRYVLGNSIAHDATIHPLEKVPLGSAMSADLIRRASTPALWCALTRLPDYDEKEGLPEDSHREIRVHDTRYSADDEMGFFASQAAQIAVQEGSADIGSAIHHARVYRCWKTNAKGVRKYFYGMIRVFQTDLLRACHDDLFTVPLPPQSISMRYGEPRVVQALQSGNAQYLGSLVVGDEIEMDFSSLDVDGQIGEYLQFFSQFSGGNLAWKHWVVDGFFNQTQLRIRPRYLAAEGLAKAFSDDVVPDGVQKIVTKQGWLPPVNTASKTAVRIVRRNAFGEPRLSSAHHMPCSWQWRHE

SEQ ID NO: 91 - protein, 1151 aa, Bifidobacterium sp. 12_1_47BFAA
MRGKRYRIGIDVGLNSVGLAAVEVSDENSPVRLLNAQSVIHDGGVDPQKNKEAITRKNMSGVARRTRRMRRRKRERLHKLDMLLGKFGYPVIEPESLDKPFEEWHVRAELATRYIEDDELRRESISIALRHMARHRGWRNPYRQVDSLISDNPYSKQYGELKEKAKAYNDDATAAEEESTPAQLVVAMLDAGYAEAPRLRWRTGSKKPDAEGYLPVRLMQEDNANELKQIFRVQRVPADEWKPLFRSVFYAVSPKGSAEQRVGQDPLAPEQARALKASLAFQEYRIANVITNLRIKDASAELRKLTVDEKQSIYDQLVSPSSEDITWSDLCDFLGFKRSQLKGVGSLTEDGEERISSRPPRLTSVQRIYESDNKIRKPLVAWWKSASDNEHEAMIRLLSNTVDIDKVREDVAYASAIEFIDGLDDDALTKLDSVDLPSGRAAYSVETLQKLTRQMLTTDDDLHEARKTLFNVTDSWRPPADPIGEPLGNPSVDRVLKNVNRYLMNCQQRWGNPVSVNIEHVRSSFSSVAFARKDKREYEKNNEKRSIFRSSLSEQLRADEQMEKVRESDLRRLEAIQRQNGQCLYCGRTITFRTCEMDHIVPRKGVGSTNTRTNFAAVCAECNRMKSNTPFAIWARSEDAQTRGVSLAEAKKRVTMFTFNPKSYAPREVKAFKQAVIARLQQTEDDAAIDNRSIESVAWMADELHRRIDWYFNAKQYVNSASIDDAEAETMKTTVSVFQGRVTASARRAAGIEGKIHFIGQQSKTRLDRRHHAVDASVIAMMNTAAAQTLMERESLRESQRLIGLMPGERSWKEYPYEGTSRYESFHLWLDNMDVLLELLNDALDNDRIAVMQSQRYVLGNSIAHDATIHPLEKVPLGSAMSADLIRRASTPALWCALTRLPDYDEKEGLPEDSHREIRVHDTRYSADDEMGFFASQAAQIAVQEGSADIGSAIHHARVYRCWKTNAKGVRKYFYGMIRVFQTDLLRACHDDLFTVPLPPQSISMRYGEPRVVQALQSGNAQYLGSLVVGDEIEMDFSSLDVDGQIGEYLQFFSQFSGGNLAWKHWVVDGFFNQTQLRIRPRYLAAEGLAKAFSDDVVPDGVQKIVTKQGWLPPVNTASKTAVRIVRRNAFGEPRLSSAHHMPCSWQWRHE

SEQ ID NO: 92 - protein, 1092 aa, Brevibacillus laterosporus GI-9
MAYTMGIDVGIASCGWAIVDLERQRIIDIGVRTFEKAENPKNGEALAVPRREARSSRRRLRRKKHRIERLKYMFVRNGLAVDIQHLEQTLRSQNEIDVWQLRVDGLDRMLTQKEWLRVLIHLAQRRGFQSNRKTDGSSEDGQVLVNVTENDRLMEEKDYRTVAEMMVKDEKFSDHKRNKNGNYHGVVSRASLLVEIHTLFESQRQHHNFLASKDFELEYINIWSSQRPVATKDQIEKMIGTCTFLPKEKRAPKASWHFQYFMLLQTINHIRITNAQGTRPLNKEEIEQVVNMALTKSKVSYHDIRKVLDLSEEYQFVGLDYGKEDEKKKVESKETIIKLDDYHKLNKIFNEVELAKGETWEAVDYDTVAYALTFFKDDEDIRDYLQNKYKDSKNRLVKNVANKEYTNELIEKVSTLSFRKVGHLSLKALRKIIPFLEQGMTYDKACQAAGFNFQGISKKKRSVVLPVIDQISNPVVNRALTQTRKVINALIKKYGSPETIHIETARELSKRFDERKNITKDYKENRDKNERAKKHLSELGIINPTGLDIVKYKLWCEQQGRCMYSNQPISFERLRESGYTEVDHIIPYSRSMNDSYNNRVLVMTRENREKSNQTPYEYMGNDTQRWDEFEQRVTTNPQIKKEKRQNLLLKGFTNRRELEMLERNLNDTRHITKYLSHFISTNLEFSPSDKKKKVVNTSGRITSHLRSRWGLEKNREQNDLHHAMDAVVIAVTSDSFIQQVTNYYKRKERRELNGDDKFPLPWKFFREEVIARLSPNPKEQIEALPNHFYSEDELADLQPIFVSRMPKRSITGEAHQAQFRRVVGKTKEGKNITAKKTALVDISYDKNGDFNMYGRETDPATYEAIKERYLEFGGNAKKAFSTDLHKPKKDGTKGPLIKSVRIMENKTLVHPVNKGKGVVYNSSIVRTDVFQRKEKYYLLPVYVTDVTKGKLPNKVIAAKKGYDDWIEVDDSFTFLYSLYPNDLIFIRQNPKKKISLKKRIESHSISDSKEVQEILTYYKGVDSSTAAIEFITHDGSYYAKGVGVQNLDCFEKYQVDILGNYSKVKGEKRLELETSDNNHKGKDVNSIKSTSR

SEQ ID NO: 93 - protein, 1428 aa, Burkholderiales bacterium 1_1_47
MGKTHIIGVGLDLGGTYTGTFITSHPSDEAEHRDHSSAFTVVNSEKLSFSSKSRTAVRHRVRSYKGFDLRRRLLLLVAEYQLLQKKQTLAPEERENLRIALSGYLKRKGYARTEAETDTSVLESLDPSVFSSAPSFTNFFNDSEPLNIQWEAIANSPETTKALNKELSGQKEADFKKYIKTSFPEYSAKEILANYVEGRRAILDASKYIANLQSLGHKHRSKYLSDILQDMKRDSRITRLSEAFGSTDNLWRIIGNISNLQERAVRWYFNDAKFEQGQEQLDAVKLKNVLVRALKYLRSDDKEWSASQKQIIQSLEQSGDVLDVLAGLDPDRTIPPYEDQNNRRPPEDQTLYLNPKALSSEYGEKWKSWANKFAGAYPLLTEDLTEILKNTDRKSRIKIRSDVLPDSDYRLAYILQRAFDRSIALDECSIRRTAEDFENGVVIKNEKLEDVLSGHQLEEFLEFANRYYQETAKAKNGLWFPENALLERADLHPPMKNKILNVIVGQALGVSPAEGTDFIEEIWNSKVKGRSTVHSICNAIENERKTYGPYFSEDYKFVKTALKEGKTEKELSKKFAAVIKVLKMVSEVVPFIGKELRLSDEAQSKFDNPYSLAQLYNLIETERNGFSKVSLAAHLENAWRMTMTDGSAQCCRLPADCVRPFDGFIRKAIDRNSWEVAKRIAEEVKKSVDFTNGTVKIPVAIEANSFNFTASLTDLKYIQLKEQKLKKKLEDIQRNEENQEKRWLSKEERIRADSHGICAYTGRPLDDVGEIDHIIPRSLTLKKSESIYNSEVNLIFVSAQGNQEKKNNIYLLSNLAKNYLAAVFGASDLSQITNEIESTVLQLKAAGRLGYFDLLSEKERACARHALFLNSDSEARRAVIDVLGSRRKASVNGTQAWFVRSIFSKVRQALAAWTQETGNELIFDAISVPAADSSEMRKRFAEYRPEFRKPKVQPVASHSIDAMCIYLAACSDPFKTKRMGSQLAIYEPINFDNLFTGSCQVIQNTPRNFSDKTNIANSPIFKETIYAERFLDIIVSRGEIFIGYPSNMPFEEKPNRISIGGKDPFSILSVLGAYLDKAPSSEKEKLTIYRVVKNKAFELFSKVAGSKFTAEEDKAAKILEALHFVTVKQDVAATVSDLIKSKKELSKDSIENLAKQKGCLKKVEYSSKEFKFKGSLIIPAAVEWGKVLWNVFKENTAEELKDENALRKALEAAWPSSFGTRNLHSKAKRVFSLPVVATQSGAVRIRRKTAFGDFVYQSQDTNNLYSSFPVKNGKLDWSSPIIHPALQNRNLTAYGYRFVDHDRSISMSEFREVYNKDDLMRIELAQGTSSRRYLRVEMPGEKFLAWFGENSISLGSSFKFSVSEVFDNKIYTENAEFTKFLPKPREDNKHNGTIFFELVGPRVIFNYIVGGAASSLKEIFSEAGKERS

SEQ ID NO: 94 - protein, 1442 aa, Caenispirillum salinarum AK4
MPVLSPLSPNAAQGRRRWSLALDIGEGSIGWAVAEVDAEGRVLQLTGTGVTLFPSAWSNENGTYVAHGAADRAVRGQQQRHDSRRRRLAGLARLCAPVLERSPEDLKDLTRTPPKADPRAIFFLRADAARRPLDGPELFRVLHHMAAHRGIRLAELQEVDPPPESDADDAAPAATEDEDGTRRAAADERAFRRLMAEHMHRHGTQPTCGEIMAGRLRETPAGAQPVTRARDGLRVGGGVAVPTRALIEQEFDAIRAIQAPRHPDLPWDSLRRLVLDQAPIAVPPATPCLFLEELRRRGETFQGRTITREAIDRGLTVDPLIQALRIRETVGNLRLHERITEPDGRQRYVPRAMPELGLSHGELTAPERDTLVRALMHDPDGLAAKDGRIPYTRLRKLIGYDNSPVCFAQERDTSGGGITVNPTDPLMARWIDGWVDLPLKARSLYVRDVVARGADSAALARLLAEGAHGVPPVAAAAVPAATAAILESDIMQPGRYSVCPWAAEAILDAWANAPTEGFYDVTRGLFGFAPGEIVLEDLRRARGALLAHLPRTMAAARTPNRAAQQRGPLPAYESVIPSQLITSLRRAHKGRAADWSAADPEERNPFLRTWTGNAATDHILNQVRKTANEVITKYGNRRGWDPLPSRITVELAREAKHGVIRRNEIAKENRENEGRRKKESAALDTFCQDNTVSWQAGGLPKERAALRLRLAQRQEFFCPYCAERPKLRATDLFSPAETEIDHVIERRMGGDGPDNLVLAHKDCNNAKGKKTPHEHAGDLLDSPALAALWQGWRKENADRLKGKGHKARTPREDKDFMDRVGWRFEEDARAKAEENQERRGRRMLHDTARATRLARLYLAAAVMPEDPAEIGAPPVETPPSPEDPTGYTAIYRTISRVQPVNGSVTHMLRQRLLQRDKNRDYQTHHAEDACLLLLAGPAVVQAFNTEAAQHGADAPDDRPVDLMPTSDAYHQQRRARALGRVPLATVDAALADIVMPESDRQDPETGRVHWRLTRAGRGLKRRIDDLTRNCVILSRPRRPSETGTPGALHNATHYGRREITVDGRTDTVVTQRMNARDLVALLDNAKIVPAARLDAAAPGDTILKEICTEIADRHDRVVDPEGTHARRWISARLAALVPAHAEAVARDIAELADLDALADADRTPEQEARRSALRQSPYLGRAISAKKADGRARAREQEILTRALLDPHWGPRGLRHLIMREARAPSLVRIRANKTDAFGRPVPDAAVWVKTDGNAVSQLWRLTSVVTDDGRRIPLPKPIEKRIEISNLEYARLNGLDEGAGVTGNNAPPRPLRQDIDRLTPLWRDHGTAPGGYLGTAVGELEDKARSALRGKAMRQTLTDAGITAEAGWRLDSEGAVCDLEVAKGDTVKKDGKTYKVGVITQGIFGMPVDAAGSAPRTPEDCEKFEEQYGIKPWKAKGIPLA

SEQ ID NO: 95 - protein, 984 aa, Campylobacter coli 1098
MARILAFDIGISSIGWAFSENDELKDCGVRIFTKAENPKTGESLALPRRLARSARKRLARRKARLNHLKHLIANEFKLNYEDYQSFDESLAKAYKGSLISPYELRFRALNELLSKQDFARVILHIAKRRGYDDIKNNGDEEKSEILKAIKQNEEKLVNYQSVGEYLYKEYFQKFKENSKEFINVRNKKESYERCIAQSFLKDELKLIFQKQREFGFSFSKKFEEEVLSVAFYKRALKDFSHLVGNCSFFTDEKRAPKNSPLAFMFVALTRIINLLNNLKNTEGILYTKDDLNALLNEVLKNGTLTYKQTKKLLGLSDDYEFKGEKGTYFIEFKKYKEFIKALGEHNLSQDDLNEIAKDITLIKDEIKLKKALAKYDLNQNQIDSLSKLEFKDHLNISFKALKLITPLMLEGKKYDEACNELNLKVAINEDKKDFLPAFNETYYKDEVTNPVVLRAIKEYRKVLNALLKKYGKVHKINIELAREVGKNYSQRAKIEKEQNENYKAKKDAELECEKLGLKINSKNILKLRLFKEQKEFCAYSGEKIKISDLQDEKMLEIDHIYPYSRSFDDSYMNKVLVFTKQNQEKLNQTPFEAFGNDSAKWQKIEVLAKNLPTKKQKRILDKNYKDKEQKNFKDRNLNDTRYIARLVLNYTKDYLDFLPLSDDENTKLNDTQKGSKVHVEAKSGMLTSALRHTWGFSAKDRNNHLHHAIDAVIIAYANNSIVKAFSDFKKEQESNSAELYAKKISELDYKNKRKFFEPFSGFRQKVLDKIDEIFVSKPERKKPSGALHEETFRKEEEFYQSYGGKEGVLKALELGKIRKVNGKIVKNGDMFRVDIFKHKKTNKFYAVPIYTMDFALKVLPNKAVARSKKGEIKDWILMDENYEFCFSLYKDSLILIQTKDMQEPEFVYYNAFTSSTVSLIVSKHDNKFETLSKNQKILFKNANEKEVIAKSIGIQNLKVFEKYIVSALGEVTKAEFRQREDFKK

SEQ ID NO: 96 - protein, 984 aa, Campylobacter coli 111-3
MARILAFDIGISSIGWAFSENDELKDCGVRIFTKAENPKTGESLALPRRLARSARKRLARRKARLNHLKHLIANEFKLNYEDYQSFDESLAKAYKGSLISPYELRFRALNELLSKQDFARVILHIAKRRGYDDIKNNGDEEKSEILKAIKQNEEKLVNYQSVGEYLYKEYFQKFKENSKEFINVRNKKESYERCIAQSFLKDELKLIFQKQREFGFSFSKKFEEEVLSVAFYKRALKDFSHLVGNCSFFTDEKRAPKNSPLAFMFVALTRIINLLNNLKNTEGILYTKDDLNTLLNEVLKNGTLTYKQTKKLLGLSDDYEFKGEKGTYFIEFKKYKEFIKALGEHNLSQDNLNEIAKDITLIKDEIKLKKALAKYDLNQNQIDSLSKLEFKDHLNISFKALKLITPLMLEGKKYDEAYNELNLKVAINEDKKDFLPAFNETYYKDEVTNPVVLRAIKEYRKVLNALLKKYGKVHKINIELAREVGKNHSQRAKIEKEQNENYKAKKDAELECEKLGLKINSKNILKLRLFKEQKEFCAYSGEKIKISDLQDEKMLEIDHIYPYSRSFDDSYMNKVLVFTKQNQEKLNQTPFEAFGNDSAKWQKIEVLAKNLPTKKQKRILDKNYKDKEQKDFKDRNLNDTRYIARLVLNYTKDYLDFLPLSDDENTKLNDTQKGSKVHVEAKSGMLTSALRHTWGFSAKDRNNHLHHAIDAVIIAYANNSIVKAFSDFKKEQESNSAELYAKKISELDYKNKRKFFEPFSGFRQKVLDKIDEIFVSKPERKKPSGALHEETFRKEEEFYQSYGGKEGVLKALELGKIRKVNGKIVKNGDMFRVDIFKHKKTNKFYAVPIYTMDFALKVLPNKAVARSKKGEIKDWILMDENYEFCFSLYKDSLILIQTKDMQEPELVYFNAFTSSTVSLIVSKHDNKFETLSKNQKILFKNANEKEVIAKSIGIQNLKVFEKYIVSALGEVTKAEFRQREDFKK

SEQ ID NO: 97 - protein, 987 aa, Campylobacter coli 132-6
MARILAFDIGISSIGWAFSENDELKDCGVRIFTKAENPKTGESLALPRRLARSARKRLARRKARLNHLKHLIANEFKLNYEDYQSFDESLAKAYKGSLISPYELRFRALNELLSKQDFARVILHIAKRRGYDDIKNNGDEEKSEILKAIKQNEEKLVNYQSVGEYLYKEYFQKFKENSKEFINVRNKKESYERCIAQSFLKDELKLIFQKQREFGFSFSKKFEEEVLSVAFYKRALKDFSHLVGNCSFFTDEKRAPKNSPLAFMFVALTRIINLLNNLKNTEGILYTKDDLNTLLNEVLKNGTLTYKQTKKLLGLSDDYEFKGEKGTYFIEFKKYKEFIKALGEHNLSQDNLNEIAKDITLIKDEIKLKKALAKYDLNQNQIDSLSKLEFKDHLNISFKALKLITPLMLEGKKYDEAYNELNLKVAINEDKKDFLPAFNETYYKDEVTNPVVLRAIKEYRKVLNALLKKYGKVHKINIELAREVGKNHSQRAKIEKEQNENYKAKKDAELECEKLGLKINSKNILKLRLFKEQKEFCAYSGEKIKISDLQDEKMLEIDHIYPYSRSFDDSYMNKVLVFTKQNQEKLNQTPFEAFGNDSAKWQKIEVLAKNLPTKKQKRILDKNYKDKEQKDFKDRNLNDTRYIARLVLNYTKDYLDFLPLSDDENTKLNDTQKGSKVHVEAKSGMLTSALRHTWGFSAKDRNNHLHHAIDAVIIAYANNSIVKAFSDFKKEQESNSAELYAKKISELDYKNKRKFFEPFSGFRQKVLDKIDEIFVSKPERKKPSGALHEETFRKEEEFYQSYGGKEGVLKALELGKIRKVNGKIVKNGDMFRVDIFKHKKTNKFYAVPIYTMDFALKVLPNKAVARSKKGEIKDWILMDENYEFCFSLYKDSLILIQTKDMQEPELVYFNAFTSSTVSLIVSKHDNKFETLSKNQKILFKNANEKEVIAKSIGIQNLKVFEKYIVSALGEVTKAEFRQREDFKNELR

SEQ ID NO: 98 - protein, 984 aa, Campylobacter coli 151-9
MARILAFDIGISSIGWAFSENDELKDCGVRIFTKAENPKTGESLALPRRLARSARKRLARRKARLNHLKHLIANEFKLNYEDYQSFDESLAKAYKGSLISPYELRFRALNELLSKQDFARVILHIAKRRGYDDIKNNGDEEKSEILKAIKQNEEKLVNYQSVGEYLYKEYFQKFKENSKEFINVRNKKESYERCIAQSFLKDELKLIFQKQREFGFSFSKKFEEEVLSVAFYKRALKDFSHLVGNCSFFTDEKRAPKNSPLAFMFVALTRIINLLNNLKNTEGILYTKDDLNTLLNEVLKNGTLTYKQTKKLLGLSDDYEFKGEKGTYFIEFKKYKEFIKALGEHNLSQDNLNEIAKDITLIKDEIKLKKALAKYDLNQNQIDSLSKLEFKDHLNISFKALKLITPLMLEGKKYDEAYNELNLKVAINEDKKDFLPAFNETYYKDEVTNPVVLRAIKEYRKVLNALLKKYGKVHKINIELAREVGKNHSQRAKIEKEQNENYKAKKDAELECEKLGLKINSKNILKLRLFKEQKEFCAYSGEKIKISDLQDEKMLEIDHIYPYSRSFDDSYMNKVLVFTKQNQEKLNQTPFEAFGNDSAKWQKIEVLAKNLPTKKQKRILDKNYKDKEQKDFKDRNLNDTRYIARLVLNYTKDYLDFLPLSNDENTKLNDTQKGSKVHVEAKSGMLTSALRHTWGFSAKDRNNHLHHAIDAVIIAYANNSIVKAFSDFKKEQESNSAELYAKKISELDYKNKRKFFEPFSGFRQKVLDKIDEIFVSKPERKKPSGALHEETFRKEEEFYQSYGGKEGVLKALELGKIRKVNGKIVKNGDMFRVDIFKHKKTNKFYAVPIYTMDFALKVLPNKAVARSKKGEIKDWILMDENYEFCFSLYKDSLILIQTKDMQEPELVYFNAFTSSTVSLIVSKHDNKFETLSKNQKILFKNANEKEVIAKSIGIQNLKVFEKYIVSALGEVTKAEFRQREDFKK

SEQ ID NO: 99 - protein, 984 aa, Campylobacter coli 1909
MARILAFDIGISSIGWAFSENDELKDCGVRIFTKAENPKTGESLALPRRLARSARKCLARRKARLNHLKHLIANEFKLNYEDYQSFDESLAKAYKGSLISPYELRFRALNELLSKQDFARVILHIAKRRGYDDIKNNGDEEKSEILKAIKQNEEKLVNYQSVGEYLYKEYFQKFKENSKEFINVRNKKESYERCIAQSFLKDELKLIFQKQREFGFSFSKKFEEEVLSVAFYKRALKDFSHLVGNCSFFTDEKRAPKNSPLAFMFVALTRIINLLNNLKNTEGILYTKDDLNALLNEVLKNGTLTYKQTKKLLGLSDDYEFKGEKGTYFIEFKKYKEFIKALGEHNLSQDDLNEIAKDITLIKDEIKLKKALAKYDLNQNQIDSLSKLEFKDHLNISFKALKLITPLMLEGKKYDEACNELNLKVAINEDKKDFLPAFNETYYKDEVTNPVVLRAIKEYRKVLNALLKKYGKVHKINIELAREVGKNHSQRAKIEKEQNENYKAKKDAELECEKLGLKINSKNILKLRLFKEQKEFCAYSGEKIKISDLQDEKMLEIDHIYPYSRSFDDSYMNKVLVFTKQNQEKLNQTPFEAFGNDSAKWQKIEVLAKNLPTKKQKRILDKNYKDKEQKNFKDRNLNDTRYIARLVLNYTKDYLDFLPLSDDENTKLNDTQKGSKVHVEAKSGMLTSALRHTWGFSAKDRNNHLHHAIDAVIIAYANNSIVKAFSDFKKEQESNSAELYAKKISELDYKNKRKFFEPFSGFRQKVLDKIDEIFVSKPERKKPSGALHEETFRKEEEFYQSYGGKEGVLKALELGKIRKVNGKIVKNGDMFRVDIFKHKKTNKFYAVPIYTMDFALKVLPNKAVARSKKGEIKDWILMDENYEFCFSLYKDSLILIQTKDMQEPEFVYYNAFTSSTVSLIVSKHDNKFETLSKNQKILFKNANEKEVIAKSIGIQNLKVFEKYIVSALGEVTKAEFRQREDFKK

SEQ ID NO: 100 - protein, 965 aa, Campylobacter coli 1957
MKIIGFNLGIANIGWALRENDEIIDCGVRVFDIPENPKNGNSLALERRENKARMKIVKRKKARMLATKTFLKKELNVDLSKLFLIGSTQSIYELRTKALSSLISKEELSAIILHIAKHRGYDDSALKNENGTIIEALNKNKEAMLKFKSVGEYFYKNFVQNKEVKKIRNTTEDYSNSVPRSLLKQELDLILDKQKELGLIKNADFKEKLFEIIFFKRPLKDFSNKIGNCIFFENEKRAAKNTISACEFVALGKVVNLLKSIEKDIGIVYEKDSINEIMSIILDKTSISYKKIRDILNLPQDINFKGLDYSKNNAENSKLVDLKKLNEFKKALGDGFANLDKDILDSIATDITLTKDTATLKEKLKNYNVLNAEQIEKLSELVFNDHINLSLKALKQIIPLMYEGKRYDEACELCNFTIAKNQEKNEYLPLFEKTRFAKDISSPVVIRAICEFRKLLNDIIRRYGSVHKIHLELTRDFGISFNDRKKIIKEIEQNEQSRIKALETIKELKLEETSKNIQIVRLFEDQKGICPYSGLKMDLKCLDELVIDYIRPYNRSLDDSYSNKILTFKKLNDLKQGKTPFEAFGEDEKLWAEINERIKEYNGKKRFKIFDKFFKDKKPFDFTEQTLQDTRWLTKLVASYLNEYLLFLPINEDENTALGYGEKGSKQHVVLSSGMITQMLRNFWYLGFKNHKDYKNNAMDAIIVAFTTNSIIFAFNNFKKELDLAKAEFYANKISESDYLLKRKFLPPFSGFKEQALEKVKNIFVSHSLKIKNKGTLHELTPLKIKELKNTYGDLDLAVKLGKIRKYNDKYYANAKGSLVRTDLFADKENKFHAVSIYKADFSTKKLPNKTPATTSNGETKEGIEMNENYNFCMSLYKNTPISVKIKGMKEPIICYYHGFNTSGSKITYKKHDNNYHNLSEDEMVVFRKNDKESIVVGKILEIKKYSISPSGELSLIENEERKWF

SEQ ID NO: 101 - protein, 984 aa, Campylobacter coli 2692
MARILAFDIGISSIGWAFSENDELKDCGVRIFTKAENPKTGESLALPRRLARSARKRLARRKARLNHLKHLIANEFKLNYEDYQSFDESLAKAYKGSLISPYELRFRALNELLSKQDFARVILHIAKRRGYDDIKNSDDKEKGAILKAIKQNEEKLTNYQSVGEYLYKEYFQKFKENSKEFTNVRNKKESYERCIAQSFLKDELKLIFKKQREFGFSFSKKFEEEVLSVAFYKRALKDFSHLVGNCSFFTDEKRAPKNSPLAFMFVALTRIINLLNNLKNTEGILYTKDDLNALLNEVLKNGTLTYKQTKKLLGLSDDYEFKGEKGTYFIEFKKYKEFIKALGDHSLSQDDLNEIAKDITLIKDEIKLKKALAKYDLNQNQIDSLSKLEFKDHLNISFKALKLITPLMLEGKKYDEACNELNLKVAINEDKKDFLPAFNETYYKDEVTNPVVLRAIKEYRKVLNALLKKYGKVHKINIELAREVGKNYSQRAKIEKEQNENYKAKKDAELECEKLGLKINSKNILKLRLFKEQKEFCAYSGEKIKISDLQDEKMLEIDHIYPYSRSFDDSYMNKVLVFTKQNQEKLNQTPFEAFGNDSAKWQKIEVLAKNLPTKKQKRILDKNYKDKEQKDFKDRNLNDTRYIARLVLNYTKDYLDFLPLSDDENTKLNDTQKGSKVHVEAKSGMLTSALRHTWGFSAKDRNNHLHHAIDAVIIAYANNSIVKAFSDFKKEQESNSAELYAKKISELDYKNKRKFFEPFSGFRQKVLDKIDEIFVSKPERKKPSGALHEETFRKEEEFYQSYGGKEGVLKALELGKIRKVNGKIVKNGDMFRVDIFKHKKTNKFYAVPIYTMDFALKVLPNKAVARSKKGEIKDWILMDENYEFCFSLYKDSLILIQTKDMQEPEFVYYNAFTSSTVSLIVSKHDNKFETLSKNQKILFKNANEKEVIAKSIGIQNLKVFEKYIVSALGEVTKAEFRQREDFKK

SEQ ID NO: 102 - protein, 984 aa, Campylobacter coli 59-2
MARILAFDIGISSIGWAFSENDELKDCGVRIFTKAENPKTGESLALPRRLARSARKRLARRKARLNHLKHLIANEFKLNYEDYQSFDESLAKAYKGSLISPYELRFRALNELLSKQDFARVILHIAKRRGYDDIKNNGDEEKGKILKAIKQNEEKLVNYQSVGEYLYKEYFQKFKENSKEFINVRNKKESYERCITQSFLKYELKLIFQKQREFGFSFSKKFEEEVLSVAFYKRALKDFSHLVGNCSFFSDEKRAPKNSPLAFMFVALTRIINLLNNLKNTEGILYTKDDLNALLNEVLKNGTLTYKQTKKLLGLSDDYEFKGEKGTYFIEFKKYKEFIKALGEHNLSQDDLNEIAKDITLIKDEIKLKKALAKYDLNQNQIDSLSKLEFKDHLNISFKALKLITPLMLEGKKYDEACNELNLKVAINEDKKDFLPAFNETYYKDEVTNPVVLRAIKEYRKVLNALLKKYGKVHKINIELAREVGKNYSQRAKIEKEQNENYKAKKDAELECEKLGLKINSKNILKLRLFKEQKEFCAYSGEKIKISDLQDEKMLEIDHIYPYSRSFDDSYMNKVLVFTKQNQEKLNQTPFEAFGNDSAKWQKIEVLAKNLPTKKQKRILDKNYKDKEQKNFKDRNLNDTRYIARLVLNYTKDYLDFLPLSDDENTKLNDTQKGSKVHVEAKSGMLTSALRHTWGFSAKDRNNHLHHAIDAVIIAYANNSIVKAFSDFKKEQESNSAELYAKKISELDYKNKRKFFEPFSGFRQKVLDKIDEIFVSKPERKKPSGALHEETFRKEEEFYQSYGGKEGVLKALELGKIRKVNGKIVKNGDMFRVDIFKHKKTNKFYAVPIYTMDFALKVLPNKAVARSKKGEIKDWILMDENYEFCFSLYKDSLILIQTKDMQEPEFVYYNAFTSSTVSLIVSKHDNKFETLSKNQKILFKNANEKEVIAKSIGIQNLKVFEKYIVSALGEVTKAEFRQREDFKK

SEQ ID NO: 103 - protein, 965 aa, Campylobacter coli 67-8
MKIIGFNLGIANIGWALRENDEIIDCGVRVFDIPENPKNGNSLALERRENKARMKIVKRKKARMLATKTFLKKELNVDLSKLFLIGSTQSIYELRTKALSSLISKEELSAIILHIAKHRGYDDSALKNENGTIIEALNKNKEAMLKFKSVGEYFYKNFVQNKEVKKIRNTTEDYSNSVPRSLLKQELDLILDKQKELGLIKNADFKAKLFEIIFFKRPLKDFSNKIGNCIFFENEKRAAKNTISACEFVALGKVVNLLKSIEKDIGIVYEKDSINEIMSIILDKTSISYKKIRDILNLPQDINFKGLDYSKNNAENSKLVDLKKLNEFKKALGDGFANLDKDILDSIATDITLTKDTATLKEKLKNYNVLNAEQIEKLSELVFNDHINLSLKALKQIIPLMYEGKRYDEACELCNFTIAKNQEKNEYLPLFEKTRFAKDISSPVVIRAICEFRKLLNDIIRRYGSVHKIHLELTRDFGISFNDRKKIIKEIEQNEQSRIKALETIKELKLEETSKNIQIVRLFEDQKGICPYSGLKMDLKCLDELVIDYIRPYNRSLDDSYSNKVLTFKKLNDLKQGKTPFEAFGEDEKLWAEINERIKEYNGKKRFKIFDKFFKDKKPFDFTEQTLQDTRWLTKLVASYLNEYLSFLPISEDENTALGYGEKGSKQHVVLSSGMITQMLRNFWYLGFKNHKNYKNNAMDAIIVAFTTNSIIFAFNNFKKELDLAKAEFYANKISESDYLLKRKFLPPFSGFKEQALEKVKNIFVSHSLKIKNKGTLHELTPLKIKELKNTYGDLDLAVKLGKIRKYNDKYYANTKGSLVRTDLFVDKENKFHAVSIYKADFSTKKLPNKTPATTSNGETKEGIEMNENYNFCMSLYKNTPVSVKIKGMKEPIICYYHGFNTSGSKITYKKHDNNYHNLSEDEMVVFRKNDKESIVVGKILEIKKYSISPSGELSLIENEKRKWF

SEQ ID NO: 104 - protein, 965 aa, Campylobacter coli 80352
MKIIGFNLGIANIGWALRENDEIIDCGVRVFDIPENPKNGNSLALERRENKARMKIVKRKKARMLATKTFLKKELNVDLSKLFLIGSTQSIYELRTKALSSLISKEELSAIILHIAKHRGYDDSALKNENGTIIEALNKNKEAMLKFKSVGEYFYKNFVQNKEVKKIRNTTEDYSNSVPRSLLKQELDLILDKQKELGLIKNADFKAKLFEIIFFKRPLKDFSNKIGNCIFFENEKRAAKNTISACEFVALGKVVNLLKSIEKDIGIVYEKDSINEIMSIILDKTSISYKKIRDILNLPQDINFKGLDYSKNNVENSKLVDLKKLNEFKKALGDGFTNLDKDILDSIATDITLTKDTATLKEKLKNYNVLNAEQIEKLSELVFNDHINLSLKALKQIIPLMYEGKRYDEACELCNFTIAKNQEKNEYLPLFEKTRFAKDISSPVVIRAICEFRKLLNDIIRRYGSVHKIHLELTRDFGISFNDRKKIIKEIEQNEQSRIKALETIKELKLEETSKNIQIVRLFEDQKGICPYSGLKMDLKCLDELVIDYIRPYNRSLDDSYSNKVLTFKKLNDLKQGKTPFEAFGEDEKLWAEINERIKEYNGKKRFKIFDKFFKDKKPFDFTEQTLQDTRWLTKLVASYLNEYLSFLPISEDENTALGYGEKGSKQHVILSSGMITQMLRNFWYLGFKNHKDYKNNAMDAIIVAFTTNSIIFTFNNFKKELDLAKAEFYANKISESDYLLKRKFLPPFSGFKEQALEKVKNIFVSHSLKIKNKGTLHELTPLKIKELKNTYGDLDLAVKLGKIRKYNDKYYANAKGSLVRTDLFADKENKFHAVSIYKADFSTKKLPNKTPATTSNGETKEGIEMNENYNFCMSLYKNTPISVKIKGMKEPIICYYHGFNTSGSKITYKKHDNNYHNLSEDEMVVFRKNDKESIVVGKILEIKKYSISPSGELSLIENEERKWF

SEQ ID NO: 105 - protein, 987 aa, Campylobacter coli 80352
MARILAFDIGISSIGWAFSENDELKDCGVRIFTKAENPKTGESLALPRRLARSARKRLARRKARLNHLKHLIANEFKLNYEDYQSFDESLAKAYKGSLISPYELRFRALNELLSKQDFARVILHIAKRRGYDDIKNSDDKEKGAILKAIKQNEEKLANYQSVGEYLYKEYFQKFKENSKEFTNVRNKKESYERCIAQSFLKDELKLIFKKQREFGFSFSKKFEEEVLSVAFYKRALKDFSHLVGNCSFFTDEKRAPKNSPLAFMFVALTRIINLLNNLKNTEGILYTKDDLNALLNEVLKNGTLTYKQTKKLLGLSDDYEFKGEKGTYFIEFKKYKEFIKALGDHSLSQDDLNEIAKDITLIKDEIKLKKALAKYDLNQNQIDSLSKLEFKDHLNISFKALKLITPLMLEGKKYDEACNELNLKVAINEDKKDFLPAFNETYYKDEVTNPVVLRAIKEYRKVLNALLKKYGKVHKINIELAREVGKNYSQRAKIEKEQNENYKAKKDAELECEKLGLKINSKNILKLRLFKEQKEFCAYSGEKIKISDLQDEKMLEIDHIYPYSRSFDDSYMNKVLVFTKQNQEKLNKTPFEAFGNDSTKWQKIEVLAKNLPEKKQKRILDKNYKDKEQKDFKDRNLNDTRYIARLVLNYTKDYLDFLPLSDDENTKLNDTQKGSKVHVEAKSGMLTSALRHTWGFSTKDRNNHLHHAIDAVIIAYANNSIVKAFSDFKKEQESNSAELYAKKISELDYKNKRKFFEPFSGFRQKVLDKIDEIFVSKPERKKPSGALHEETFRKEEEFYQSYGGKEGVLKALELGKIRKVNGKIVKNGDMFRVDIFKHKKTNKFYAVPIYTMDFALKVLPNKAVARSKKGEIKDWILMDENYEFCFSLYKDSLILIQTKDMQEPEFVYYNAFTSSTVSLIVSKHDNKFETLSKNQKILFKNANEKEVIAKSIGIQNLKVFEKYIVSALGEVTKAEFRQREDFKNELR

SEQ ID NO: 106 - protein, 984 aa, Campylobacter jejuni
MAKILAFDIGISSIGWAFSENDELKDCGVRIFTKAENPKTGESLALPRRIARSARKRLARRKARLNHLKHLIANEFKLNYEDYQSFDEILAKAYKGSLISPYELRFRALNELLSKQDFARVILHIAKRRGYDDIKNNGDEEKGKILKAIKQNEEKLANYQSVGEYLYKEYFQKFKENSKEFINVRNKKESYERCIAQSFLKDELKLIFKKQREFGFSFSKKFEEEVLSVAFYKRALKDFSHLVGNCSFFTDEKRAPKNSPLAFMFVALTRIINLLNNLKNTLYTKDDLNALLNEVLKNGTLTYKQTKKLLGLSDDYEFKGEKGNYFIEFKKYKEFIKALGEHSLSQDDLNEIAKDITLIKDEIKLKKALAKYDLNENQIDNLSKLEFKDHLNISFKALKLITPLMLEGKKYDEACNELTLKVAINEDKKDFLPAFNETYYKDEVTNPVVLRAIKEYRKVLNALLKKYGKVHKINIELAREVGKNHSQRAKIEKEQNENYKAKKDAELECEKLGLKINSKNILKLRLFKEQKEFCVYSGEKIKLSDLQDEKMLEIDHIYPYSRSFDDSYMNKVLVFTKQNQEKLNQTPFEAFGNDSAKWQKIEVLAKNLPTKKQKRILDKNYKDKEQKDFKDRNLNDTRYIARLVLNYTKDYLDFLPLSDDENTKLNDTQKGSKVHVEAKSGMLTSALRHTWGFSTKDRNNHLHHAIDAVIIAYANNSIVKAFSDFKKEQESNTAELYAKKISELDYKNKRKFFEPFSGFRQKVLDKIDEIFVSKPERKKPSGALHEETFRKEEEFYQSYGGKEGVLKALELGKIRKVNGKIVKNGDMFRVDIFKHKKTNKFYAVPIYTMDFALKVLPNKAVARSKKGEIKDWILMDENYEFCFSLYKDSLILIQTKDMQEPEFVYYNAFTSSTVSLIVSKHDNKFETLSKNQKILFKNANEKEVIAKSIGIQNLKVFEKYIVSALGEVTKAEFRQREEFKNELR

SEQ ID NO: 107 - protein, 987 aa, Campylobacter jejuni subsp. jejuni 110-21
MARILAFDIGISSIGWAFSENDELKDCGVRIFTKAENPKTGESLALPRRLARSARKRLARRKARLNHLKHLIANEFKLNYEDYQSFDESLAKAYKGSLISPYELRFRALNELLSKQDFARVILHIAKRRGYDNIKNSDNEEKSEILKAIKQNEEKLVNYQSVGEYLYKEYFQKFKENSKEFINVRNKKESYERCIAQSFLKDELKLIFQKQREFGLSFSKKFEEEVLSVAFYKRALKDFSHLVGNCSFFTDEKRAPKNSPLAFMFVALTRIINLLNNLKNTEGILYTKDDLNTLLNEVLKNGTLTYKQTKKLLGLSDDYEFKGEKGTYFIEFKKYKEFIKALGDHSLSQDDLNEIAKDITLIKDEIKLKKALAKYDLNQNQIDSLSKLEFKDHLNISFKALKLITPLMLEGKKYDEACNELNLKVVINEDKKDFLPAFNETYYKDEVTNPVVLRAIKEYRKVLNALLKKYGKVHKINIELAREVGKNHSQRAKIEKEQNENYKAKKDAELECEKLGLKINNKNILKLRLFKEQKEFCAYSGEKIKLSDLQDEKMLEIDHIYPYSRSFDDSYMNKVLVFTKQNQEKLNKTPFEAFGNDSTKWQKIEVLAKNLPTKKQKRILDKNYKDKEQKDFKDRNLNDTRYIARLVLNYTKDYLDFLPLSDDENTKLNDIQKGSKVHVEAKSGMLTSALRHTWGFSTKDRNNHLHHAIDAVIIAYANNSIVKAFSDFKKEQESNSAELYAKKISELDYKNKRKFFEPFSGFRQKVLDKIDEIFVSKPERKKPSGALHEETFRKEEEFYQSYGGKEGVLKALELGKIRKVNGKIVKNGDMFRVDIFKHKKTNKFYAVPIYTMDFALKVLPNKAVVQGKDKKSGLIKDWILMDENYEFCFSLYKDSLILIQTKDMQEPEFVYYNAFTSSTVSLIVSKHDNKFETLSKNQKILFKNANEKEVIAKSIGIQNLKVFEKYIVSALGEVTKAEFRQREDFKK

SEQ ID NO: 108 - protein, 987 aa, Campylobacter jejuni subsp. jejuni 129-258
MARILAFDIGISSIGWAFSENDELKDCGVRIFTKAENPKTGESLALPRRLARSARKRLARRKARLNHLKHLIANEFKLNYEDYQSFNESLAKAYKGSLISPYELRFRALNELLSKQDFARVILHIAKRRGYDDIKNSDDKEKGAILKVIKQNEEKLANYQSVGEYLYKEYFQKFKENSKEFTNVRNKKESYERCIAQSFLKDELKLIFQKQREFGFSFSKKFEEEVLSVAFYKRALKDFSHLVGNCSFFTDEKRAPKNSPLAFMFVALTRIINLLNNLKNTEGILYTKDDLNALLNEVLKNGTLTYKQTKKLLGLSDDYEFKGEKGTYFIEFKKYKEFIKALGDHSLSQDDLNEIAKDITLIKDEIKLKKALAKYDLNQNQIDSLSKLEFKDHLNISFKALKLITPLMLEGKKYDEACNELNLKVAINEDKKDFLPAFNETYYKDEVTNPVVLRAIKEYRKVLNALLKKYGKVHKINIELAREVGKNYSQRAKIEKEQNENYKAKKDAELECEKLGLKINSKNILKLRLFKEQKEFCAYSGEKIKISDLQDEKMLEIDHIYPYSRSFDDSYMNKVLVFTKQNQEKLNQTPFEAFGNDSAKWQKIEVLAKNLPTKKQKRILDKNYKDKEQKDFKDRNLNDTRYIARLVLNYTKDYLDFLPLSDDENTKLNDTQKGSKVHVEAKSGMLTSALRHTWGFSAKDRNNHLHHAIDAVIIAYANNSIVKAFSDFKKEQESNSAELYAKKISELDYKNKRKFFEPFSGFRQKVLDKIDEIFVSKPERKKPSGALHEETFRKEEEFYQSYGGKEGVLKALELGKIRKVNGKIVKNGDMFRVDIFKHKKTNKFYAVPIYTMDFALKVLPNKAVARSKKGEIKDWILMDENYEFCFSLYKDSLILIQTKDMQEPELVYFNAFTSSTVSLIVSKHDNKFETLSKNQKILFKNANEKEVIAKSIGIQNLKVFEKYIVSALGEVTKAEFRQREDFKNELR

SEQ ID NO: 109 - protein, 987 aa, Campylobacter jejuni subsp. jejuni 1336
MARILAFDIGISSIGWAFSENDELKDCGVRIFTKAENPKTGESLALPRRLARSARKRLARRKARLNHLKHLIANEFKLNYEDYQSFDESLAKAYKGSLISPYELRFRALNELLSKQDFARVILHIAKRRGYDDIKNNGDEEKGKILKAIKQNEEKLVSYQSVGEYLYKEYFQKFKENSKEFINVRNKKESYERCIAQSFLKDELKLIFQKQREFGFSFSKKFEEEVLSVAFYKRALKDFSHLVGNCSFLLMKKERQKNSPLAFMFVALTRIINLLNNLKNTEGILYTKDDLNTLLNEALKNGTLTYKQTKKLLGLSNDYEFKGEKGTYFIEFQKYKEFVKALGEHNLSQDDLNEIAKDITLIKDEIKLKKALAKYDLNQNQIDSLSKLEFKDHLNISFKALKLITPLMLEGKKYDEACNELNLKVAINEDKKDFLPAFNETYYKDEVTNPVVLRAIKEYRKVLNALLKKYGKVHKINIELAREVGKNHSQRAKIEKEQNENYKAKKDAELECEKLGLKINSKNILKLRLFKEQKEFCVYSGEKIKISDLQDEKMLEIDHIYPYSRSFDDSYMNKVLVFTKQNQEKLNKTPFETFGNDRVKWQKIEVLAKNLPTKKQKRILDKNYKDKEQKDFKDRNLNDTRYIARLVLNYTKDYLDFLPLSDDENTKLNDTQKGSKVHVEAKSGMLTSTLRHTWGFSTKDRNNHLHHAIDAAIIAYANNSIVKAFSDFKKEQESNTAELYAKKISELDYKNKRKFFEPFSGFRQKLLDKIDEIFVSKPERKKPSGALHEETFRKEEEFYQSYGGKEGVLKALELGKIRKVNGKMVKNGDMFRVDIFKHKKTNKFYAVPIYTMDFALKVLPNKAVVQGKDKKSGLIKDWILMDENYEFCFSLYKDSLILIQTKDMQEPELVYYERLDSSNASLTVSKHDNKFETLSKNQKILFKNANEKEVIAKSIGIQNLKVFEKYIVSALGEVTKAEFRQREDFKK

SEQ ID NO: 110 - protein, 984 aa, Campylobacter jejuni subsp. jejuni 140-16
MARILAFDIGISSIGWAFSENDELKDCGVRIFTKVENPKTGESLALPRRLARSARKRLARRKARLNHLKHLIANEFKLNYEDYQSFDESLAKAYKGSLISPYELRFRALNELLSKQDFARVILHIAKRRGYDDIKNSDDKEKGAILKAIKQNEEKLANYQSVGEYLYKEYFQKFKENSKEFTNVRNKKESYERCIAQSFLKDELKLIFKKQREFGFSFSKKFEEEVLSVAFYKRALKDFSHLVGNCSFFTDEKRAPKNSPLAFMFVALTRIINLLNNLKNTEGILYTKDDLNALLNEVLKNGTLTYKQTKKLLGLSDDYEFKGEKGTYFIEFKKYKEFIKALGEHNLSQDDLNEIAKDITLIKDEIKLKKALAKYDLNQNQIDSLSKLEFKDHLNISFKALKLITPLMLEGKKYDEACNELNLKVAINEDKKDFLPAFNETYYKDEVTNPVVLRAIKEYRKVLNALLKKYGKVHKINIELAREVGKNHSQRAKIEKEQNENYKAKKDAELECEKLGLKINSKNILKLRLFKEQKEFCAYSGEKIKISDLQDEKMLEIDHIYPYSRSFDDSYMNKVLVFTKQNQEKLNKTPFEAFGNDSAKWQKIEVLAKNLPTKKQKRILDKNYKDKEQKDFKDRNLNDTRYIARLVLNYTKDYLDFLPLSDDENTKLNDTQKGSKVHVEAKSGMLTSALRHTWGFSTKDRNNHLHHAIDAVIIAYANNSIVKAFSDFKKEQESNSAELYAKKISELDYKNKRKFFEPFSGFRQKVLDKIDEIFVSKPERKKPSGALHEETFRKEEEFYQSYGGKEGVLKALELGKIRKVNGKIVKNGDMFRVDIFKHKKTNKFYAVPIYTMDFALKVLPNKAVARSKKGEIKDWILMDENYEFCFSLYKDSLILIQTKDMQEPEFVYYNAFTSSTVSLIVSKHDNKFETLSKNQKILFKNANEKEVIAKSIGIQNLKVFEKYIVSALGEVTKAEFIQREDFKK

SEQ ID NO: 111 - protein, 984 aa, Campylobacter jejuni subsp. jejuni 1577
MARILAFDIGISSIGWAFSENDELKDCGVRIFTKVENPKTGESLALPRRLARSARKRLARRKVRLNHLKHLIANEFKLNYEDYQSFDESLAKAYKGSLISPYELRFRALNELLSKQDFARVILHIAKRRGYDDIKNSDDKEKGAILKAIKQNEEKLANYQSVGEYLYKEYFQKFKENSKEFTNVRNKKESYERCIAQSFLKDELKLIFKKQREFGFSFSKKFEEEVLSVAFYKRALKDFSHLVGNCSFFTDEKRAPKNSPLAFMFVALTRIINLLNNLKNTEGILYTKDDLNALLNEVLKNGTLTYKQTKKLLGLSDDYEFKGEKGTYFIEFKKYKEFIKALGEHNLSQDDLNEIAKDITLIKDEIKLKKALAKYDLNQNQIDSLSKLEFKDHLNISFKALKLITPLMLEGKKYDEACNELNLKVAINEDKKDFLPAFNETYYKDEVTNPVVLRAIKEYRKVLNALLKKYGKVHKINIELAREVGKNHSQRAKIEKEQNENYKAKKDAELECEKLGLKINSKNILKLRLFKEQKEFCAYSGEKIKISDLQDEKMLEIDHIYPYSRSFDDSYMNKVLVFTKQNQEKLNKTPFEAFGNDSAKWQKIEVLAKNLPTKKQKRILDKNYKDKEQKDFKDRNLNDTRYIARLVLNYTKDYLDFLPLSDDENTKLNDTQKGSKVHVEAKSGMLTSALRHTWGFSTKDRNNHLHHAIDAVIIAYANNSIVKAFSDFKKEQESNSAELYAKKISELDYKNKRKFFEPFSGFRQKVLDKIDEIFVSKPERKKPSGALHEETFRKEEEFYQSYGGKEGVLKALELGKIRKVNGKIVKNGDMFRVDIFKHKKTNKFYAVPIYTMDFALKVLPNKAVARSKKGEIKDWILMDENYEFCFSLYKDSLILIQTKDMQEPEFVYYNAFTSSTVSLIVSKHDNKFETLSKNQKILFKNANEKEVIAKSIGIQNLKVFEKYIVSALGEVTKAEFRQREDFKK

SEQ ID NO: 112 - protein, 987 aa, Campylobacter jejuni subsp. jejuni 1854
MARILAFDIGISSIGWAFSENDELKDCGVRIFTKAENPKTGESLALPRRLARSARKRLARRKARLNHLKHLIANEFKLNYEDYQSFDESLAKAYKGSLISPYELRFRALNELLSKQDFARVILHIAKRRGYDDIKNSDDKEKGAILKAIKQNEEKLANYQSVGEYLYKEYFQKFKENSKEFTNVRNKKESYERCIAQSFLKDELKLIFKKQREFGFSFSKKFEEEVLSVAFYKRALKDFSHLVGNCSFFTDEKRAPKNSPLAFMFVALTRIINLLNNLKNTEGILYTKDDLNTLLNEVLKNGTLTYKQTKKLLGLSDDYEFKGEKGTYFIEFKKYKEFIKSLGDHSLSQDDLNEIAKDITLIKDEIKLKKALAKYDLNQNQIDSLSKLEFKDHLNISFKALKLITPLMLEGKKYDEACNELNLKVAINEDKKDFLPAFNETYYKDEVTNPVVLRAIKEYRKVLNALLKKYGKVHKINIELAREVGKNHSQRAKIEKEQNENYKAKKDAELECEKLGLKINSKNILKLRLFKEQKEFCAYSGEKIKISDLQDEKMLEIDHIYPYSRSFDDSYMNKVLVFTKQNQEKLNQTPFEAFGNDSAKWQKIEVLAKNLPTKKQKRILDKNYKDKEQKNFKDRNLNDTRYIARLVLNYTKDYLDFLPLSDDENTKLNDTQKGSKVHVEAKSGMLTSALRHTWGFSAKDRNNHLHHAIDAVIIAYANNSIVKAFSDFKKEQESNSAELYAKKISELDYKNKRKFFEPFSGFRQKVLDKIDEIFVSKPERKKPSGALHEETFRKEEEFYQSYGGKEGVLKALELGKIRKVNGKIVKNGDMFRVDIFKHKKTNKFYAVPIYTMDFALKVLPNKAVARSKKGEIKDWILMDENYEFCFSLYKDSLILIQTKDMQEPEFVYYNAFTSSTVSLIVSKHDNKFETLSKNQKILFKNANEKEVIAKSIGIQNLKVFEKYIVSALGEVTKAEFRQREDFKNELR

SEQ ID NO: 113 - protein, 984 aa, Campylobacter jejuni subsp. jejuni 1997-10
MARILAFDIGISSIGWAFSENDELKDCGVRIFTKAENPKTGESLALPRRLARSARKRLARRKARLNRLKHLIANEFKLNYEDYQSFDESLAKAYKGSLISPYELRFRALNELLSKQDFARVILHIAKRRGYDDIKNSDDKEKGAILKAIKQNEEKLANYQSVGEYLYKEYFQKFKENSKEFTNVRNKKESYERCIAQSFLKDELKLIFKKQREFGFSFSKKFEEEVLSVAFYKRALKDFSHLVGNCSFFTDEKRAPKNSPLAFMFVALTRIINLLNNLKNTEGILYTKDDLNALLNEVLKNGTLTYKQTKKLLGLSDDYEFKGEKGTYFIEFKKYKEFIKALGDHSLNQDDLNEIAKDITLIKDEIKLKKALAKYDLNQNQIDSLSKLEFKDHLNISFKALKLITPLMLEGKKYDEACNELNLKVAINEDKKDFLPAFNETYYKDEVTNPVVLRAIKEYRKVLNALLKKYGKVHKINIELAREVGKNYSQRAKIEKEQNENYKAKKDAELECEKLGLKINSKNILKLRLFKEQKEFCVYSGEKIKISDLQDEKMLEIDHIYPYSRSFDDSYMNKVLVFTKQNQEKLNQTPFEAFGNDSAKWQKIEVLAKNLPTKKQKRILDKNYKDKEQKDFKDRNLNDTRYIARLVLNYTKDYLDFLPLSDDENTKLNDTQKGSKVYVEAKSGMLTSALRHTWGFSTKDRNNHLHHAIDAVIIAYANNSIVKAFSDFKKEQESNSAELYAKKISELDYKNKRKFFEPFSGFRQKVLDKIDEIFVSKPERKKPSGALHEETFRKEEEFYQSYGGKEGVLKALELGKIRKVNGKIVKNGDMFRVDIFKHKKTNKFYAVPIYTMDFALKVLPNKAVARSKKGEIKDWILMDENYEFCFSLYKDSLILIQTKDMQEPEFVYYNAFTSSTVSLIVSKHDNKFETLSKNQKILFKNANEKEVIAKSIGIQNLKVFEKYIVSALGEVTKAEFRQREDFKK

SEQ ID NO: 114 - protein, 987 aa, Campylobacter jejuni subsp. jejuni 2008-1025
MARILAFDIGISSIGWAFSENDELKDCGVRIFTKAENPKTGESLALPRRLARSARKRLARRKARLNHLKHLIANEFKLNYEDYQSFDESLAKAYKGSLISPYELRFRALNELLSKQDFARVILHIAKRRGYDDIKNNGDEEKSEILKAIKQNEEKLVNYQSVGEYLYKEYFQKFKENSKEFINVRNKKESYERCIAQSFLKDELKLIFQKQREFGFSFSKKFEEEVLSVAFYKRALKDFSHLVGNCSFFTDEKRAPKNSPLAFMFVALTRIINLLNNLKNTEGILYTKDDLNTLLNEVLKNGTLTYKQTKKLLGLSDDYEFKGEKGTYFIEFKKYKEFIKALGEHNLSQDNLNEIAKDITLIKDEIKLKKALAKYDLNQNQIDSLSKLEFKDHLNISFKALKLITPLMLEGKKYDEAYNELNLKVAINEDKKDFLPAFNETYYKDEVTNPVVLRAIKEYRKVLNALLKKYGKVHKINIELAREVGKNHSQRAKIEKEQNENYKAKKDAELECEKLGLKINSKNILKLRLFKEQKEFCAYSGEKIKISDLQDEKMLEIDHIYPYSRSFDDSYMNKVLVFTKQNQEKLNQTPFEAFGNDSAKWQKIEVLAKNLPTKKQKRILDKNYKDKEQKDFKDRNLNDTRYIARLVLNYTKDYLDFLPLSDDENTKLNDTQKGSKVHVEAKSGMLTSALRHTWGFSAKDRNNHLHHAIDAVIIAYANNSIVKAFSDFKKEQESNSAELYAKKISELDYKNKRKFFEPFSGFRQKVLDKIDEIFVSKPERKKPSGALHEETFRKEEEFYQSYGGKEGVLKALELGKIRKVNGKIVKNGDMFRVDIFKHKKTNKFYAVPIYTMDFALKVLPNKAVVQGKDKKSGLIKDWILMDENYEFCFSLYKDSLILIQTKDMQEPELVYFNAFTSSTVSLIVSKHDNKFETLSKNQKILFKNANEKEVIAKSIGIQNLKVFEKYIVSALGEVTKAEFRQREDFKK

SEQ ID NO: 115 - protein, 984 aa, Campylobacter jejuni subsp. jejuni 2008-872
MARILAFDIGISSIGWAFSENDELKDCGVRIFTKVENPKTGESLALPRRLARSARKRLARRKARLNHLKHLIANEFKLNYEDYQSFDESLAKAYKGSLISPYELRFRALNELLSKQDFARVILHIAKRRGYDDIKNSDDKEKGAILKAIKQNEEKLANYQSVGEYLYKEYFQKFKENSKEFTNVRNKKESYERCIAQSFLKDELKLIFKKQREFGFSFSKKFEEEVLSVAFYKRALKDFSHLVGNCSFFTDEKRAPKNSPLAFMFVALTRIINLLNNLKNTEGILYTKDDLNALLNEVLKNGTLTYKQTKKLLGLSDDYEFKGEKGTYFIEFKKYKEFIKALGEHNLSQDDLNEIAKDITLIKDEIKLKKALAKYDLNQNQIDSLSKLEFKDHLNISFKALKLITPLMLEGKKYDEACNELNLKVAINEDKKDFLPAFNETYYKDEVTNPVVLRAIKEYRKVLNALLKKYGKVHKINIELAREVGKNHSQRAKIEKEQNENYKAKKDAELECEKLGLKINSKNILKLRLFKEQKEFCAYSGEKIKISDLQDEKMLEIDHIYPYSRSFDDSYMNKVLVFTKQNQEKLNKTPFEAFGNDSAKWQKIEVLAKNLPTKKQKRILDKNYKDKEQKDFKDRNLNDTRYIARLVLNYTKDYLDFLPLSDDENTKLNDTQKGSKVHVEAKSGMLTSALRHTWGFSTKDRNNHLHHAIDAVIIAYANNSIVKAFSDFKKEQESNSAELYAKKISELDYKNKRKFFEPFSGFRQKVLDKIDEIFVSKPERKKPSGALHEETFRKEEEFYQSYGGKEGVLKALELGKIRKVNGKIVKNGDMFRVDIFKHKKTNKFYAVPIYTMDFALKVLPNKAVARSKKGEIKDWILMDENYEFCFSLYKDSLILIQTKDMQEPEFVYYNAFTSSTVSLIVSKHDNKFETLSKNQKILFKNANEKEVIAKSIGIQNLKVFEKYIVSALGEVTKAEFRQREDFKK

SEQ ID NO: 116 - protein, 987 aa, Campylobacter jejuni subsp. jejuni 2008-979
MARILAFDIGISSIGWAFSENDELKDCGVRIFTKAENPKTGESLALPRRLARSARKRLARRKARLNHLKHLIANEFKLNYEDYQSFDESLAKAYKGSLISPYELRFRALNELLSKQDFARVILHIAKRRGYDDIKNSDDKEKGAILKAIKQNEEKLVNYQSVGEYLYKEYFQKFKENSKEFTNVRNKKESYERCIAQSFLKDELKLIFKKQREFGFSFSKKFEEEVLSVAFYKRALKDFSHLVGNCSFFTDEKRAPKNSPLAFMFVALTRIINLLNNLKNTEGILYTKDDLNALLNEVLKNGTLTYKQTKKLLGLSDDYEFKGEKGTYFIEFKKYKEFIKALGDHSLSQDDLNEIAKDITLIKDEIKLKKALAKYDLNQNQIDSLSKLEFKDHLNISFKALKLITPLMLEGKKYDEACNELNLKVAINEDKKDFLPAFNETYYKDEVTNPVVLRAIKEYRKVLNALLKKYGKVHKINIELAREVGKNYSQRAKIEKEQNENYKAKKDAELECEKLGLKINSKNILKLRLFKEQKEFCAYSGEKIKISDLQDEKMLEIDHIYPYSRSFDDSYMNKVLVFTKQNQEKLNQTPFEAFGNDSAKWQKIEVLAKNLPTKKQKRILDKNYKDKEQKDFKDRNLNDTRYIARLVLNYTKDYLDFLPLSDDENTKLNDTQKGSKVHVEAKSGMLTSALRHTWGFSAKDRNNHLHHAIDAVIIAYANNSIVKAFSDFKKEQESNSAELYAKKISELDYKNKRKFFEPFSGFRQKVLDKIDEIFVSKPERKKPSGALHEETFRKEEEFYQSYGGKEGVLKALELGKIRKVNGKIVKNGDMFRVDIFKHKKTNKFYAVPIYTMDFALKVLPNKAVARSEKGEIKDWILMDENYEFCFSLYKDSLILIQTKDMQEPELVYFNAFTSSTVSLIVSKHDNKFETLSKNQKILFKNANEKEVIAKSIGIQNLKVFEKYIVSALGEVTKAEFRQREDFKNELR

SEQ ID NO: 117 - protein, 965 aa, Campylobacter jejuni subsp. jejuni 2008-988
MKIIGFNLGIANIGWALRENDEIIDCGVRVFDIPENPKNGNSLALERRENKARMKIVKRKKARMLATKTFLKKELNVDLSKLFLIGSTQSIYELRAKALSSLISKEELSAIILHIAKHRGYDDSALKNENGTIIEALNKNKETMLKFKSVGEYFYKNFVQNKEVKKIRNTTEDYSNSVPRSLLKQELDLILDKQKELGLIKNADFKEKLFEIIFFKRPLKDFSNKIGNCIFFENEKRAAKNTISACEFVALGKVVNLLKSIEKDIGIVYEKDSINEIMSIILDKTSISYKKIRDILNLPQEINFKGLDYSKNNVENSKLVDLKKLNEFKKALGDGFANLDKDILDSIATDITLTKDTATLKEKLKNYNVLNAEQIEKLSELVFNDHINLSLKALKQIIPLMYEGKRYDEACELCNFTIAKNQEKSEYLPLFEKTRFAKDISSPVVIRAICEFRKLLNDIIRRYGSVHKIHLELTRDFGISFSDRKKIIKEIEQNEQSRIKALETIKELKLEETSKNIQIVRLFEDQKGICPYSGLKMDLNRLDELVIDYIRPYNRSLDDSYSNKVLTFKKLSDLKQGKTPFEAFGEDEKLWAEINERIKEYNGKKRFKIFDKFFKDKKPFDFTEQTLQDTRWLTKLVASYLNEYLSFLPISEDENTALGYGEKGSKQHVILSSGMITQMLRNFWYLGFKNHKDYKNNAMDAIIVAFTTNSIIFAFNNFKKELDLAKAEFYANKISESDYLLKRKFLPPFSGFKEQALEKVKNIFVSHSLKIKNKGTLHDLTPLKIKELKNTYGDLDLAVKLGKIRKYNDKYYANANGSLVRADLFVDKKNKFHAVSIYKADFSTKKLPNKTPATTSNGETKEGIEMNENYNFCMSLYKNTPISVKIKGMKEPIICYYHGFNTSGSKITYKKHDNNYHNLSEDEMVVFRKNDKESIAVGKILEIKKYSISPSGELSLIENEERKWF

SEQ ID NO: 118 - protein, 984 aa, Campylobacter jejuni subsp. jejuni 2008-988
MARILAFDIGISSIGWAFSENDELKDCGVRIFTKVENPKTGESLALPRRLARSARKRLARRKARLNHLKHLIANEFKLNYEDYQSFDESLAKAYKGSLISPYELRFRALNELLSKQDFARVILHIAKRRGYDDIKNSDDKEKGAILKAIKQNEEKLANYQSVGEYLYKEYFQKFKENSKEFTNVRNKKESYERCIAQSFLKDELKLIFKKQREFGFSFSKKFEEEVLSVAFYKRALKDFSHLVGNCSFFTDEKRAPKNSPLAFMFVTLTRIINLLNNLKNTEGILYTKDDLNALLNEVLKNGTLTYKQTKKLLGLSDDYEFKGEKGTYFIEFKKYKEFIKALGEHNLSQDDLNEIAKDITLIKDEIKLKKALAKYDLNQNQIDSLSKLEFKDHLNISFKALKLITPLMLEGKKYDEACNELNLKVAINEDKKDFLPAFNETYYKDEVTNPVVLRAIKEYRKVLNALLKKYGKVHKINIELAREVGKNHSQRAKIEKEQNENYKAKKDAELECEKLGLKINSKNILKLRLFKEQKEFCAYSGEKIKISDLQDEKMLEIDHIYPYSRSFDDSYMNKVLVFTKQNQEKLNKTPFEAFGNDSAKWQKIEVLAKNLPTKKQKRILDKNYKDKEQKDFKDRNLNDTRYIARLVLNYTKDYLDFLPLSDDENTKLNDTQKGSKVHVEAKSGMLTSALRHTWGFSTKDRNNHLHHAIDAVIIAYANNSIVKAFSDFKKEQESNSAELYAKKISELDYKNKRKFFEPFSGFRQKVLDKIDEIFVSKPERKKPSGALHEETFRKEEEFYQSYGGKEGVLKALELGKIRKVNGKIVKNGDMFRVDIFKHKKTNKFYAVPIYTMDFALKVLPNKAVARSKKGEIKDWILMDENYEFCFSLYKDSLILIQTKDMQEPEFVYYNAFTSSTVSLIVSKHDNKFETLSKNQKILFKNANEKEVIAKSIGIQNLKVFEKYIVSALGEVTKAEFRQREDFKK

SEQ ID NO: 119 - protein, 961 aa, Campylobacter jejuni subsp. jejuni 260.94
MARILAFDIGISSIGWAFSENDELKDCGVRIFTKAENPKTGESLALPRRLARSARKRLARRKARLNHLKHLIANEFKLNYEDYQSFDESLAKAYKGSLISPYELRFRALNELLSKQDFARVILHIAKRRGYDDIKNNGDEEKGKILKAIKQNEEKLVNYQSVGEYLYKEYFQKFKENSKEFINVRNKKESYERCITQSFLKYELKLIFQKQREFGFSFSKKFEEEVLSVAFYKRALKDFSHLVGNCSFFSDEKRAPKNSPLAFMFVALTRIINLLNNLKNTEGILYTKDDLNALLNEVLKNGTLTYKQTKKLLGLSDDYEFKGEKGTYFIEFKKYKEFIKALGEHNLSQDDLNEIAKDITLIKDEIKLKKALAKYDLNQNQIDSLSKLEFKDHLNIGFKALKLITPLMLEGKKYDEACNELNLKVAINEDKKDFLPAFNETYYKDEVTNPVVLRAIKEYRKVLNALLKKYGKVHKINIELAREVGKNHSQRAKIEKEQNENYKAKKDAELECEKLGLKINSKNILKLRLFKEQKEFCAYSGEKIKLSDLQDEKMLEIDHIYPYSRSFDDSYMNKVLVFTKQNQEKLNKTPFEAFGNDNVKWQKIEVLAKNLPEKKQKRILDKNYKDKEQKDFKDRNLNDTRYIARLVLNYTKDYLDFLPLSDDENTKLKGSKVHVEAKSGMLTSALRHTWGFSTKDRNNHLHHAIDAAIIAYANNSIVKDFSDFKKEQESNSAELYAKKISELDYKNKRKFFEPFSGFRQKVLDKIDEIFVSKPERKKPSGALHEETFRKEEEFYQSYGGKEGVLKALELGKIRKVNGKIVKNGDMFRVDIFKHKKTNKFYAVPIYTMDFALKVLPNKAVARSKKGEIKDWILMDENYEFCFSLYKDSLILIQTKDMQEPELVYFNAFTSSTVSLIVSKHDNKFETLSKNLKVFEKYIVSALGEVTKAEFRQREDFKNELR

SEQ ID NO: 120 - protein, 985 aa, Campylobacter jejuni subsp. jejuni 414
MAKILAFDIGISSIGWAFVENDELKDCGVRIFTKAENPKTGESLALPRRLARSARKRLARRKARLNHLKHLIANEFKLNYEDYQSFDESLAKAYKGTLISPYELRFKALNELLSKQDLARVILHIAKRRGYDNIKNSDDKEKGAILKAVKENEEKLANYKSVGEYLYKEYFQKFKENSKEFINVRNKKESYERCIAQSFLKDELKLIFQKQREFGFNFSKKFEEEVLSVAFYKRALKDFSHLVGNCSFFVDEKRAPKNSPLAFEFVALTRIVNLLNNLNKNNSYIKDDLNALLSEVLKNGTLTYKQTKKILGLSDDYEFKGQKGNYFIEFKKYKEFIKALCEHNLNQDDLNEIAKDITLVKDETKLKKALAKYDLNQNQIENLSKIEFKDHLNISFKALKLIVPLMREGKKYDEVCNELNLKTAINEDKKEFLPAFNETYYKDEVNNPVVLRAIKEYRKVLNSLLKKYGKVHKINIELAREVGKNHRERSKIEKEQNENFKAKKDAELECEKLGLKINSKNILKLRLFKEQKEFCVYSGEKIKISDLQDEKMLEIDHIYPYSRSFDDSYMNKVLVFTKQNQEKLNKTPFEAFGKDDVKWQKIETLAKNLPAKKQKRILDKNYKDKEQKDFKDRNLNDTRYIARLVLNYTKDYLEFLPLSDDENIKLNDTQKGSKVHVEAKSGMLTSVLRHTWGFSTKDRNNHLHHAIDAVIIAYANASVVKAFSDFKKEQENYTAELYAKKINELDFKNKRKFFEPFSNFRQKVLEKIDEIFVSKPERKKPSGALHEETFYKEEEFYKEYGGKEGVLKALELGKIRKVNGKIVSNANMFRVDIFKYKKTNKFYAVPIYTMDFALGILPNKAVVGGKDKQGIIKDWLLMDENYEFCFSLYKDSLILLQTKDMQEPELVYFKSFKSSTAGLVVSKHDNKFENLNENQKKLFKSANEKKVVAEGIGIQNLKVFEKYIVSALGEITKAEIKERENFKKK

SEQ ID NO: 121 - protein, 984 aa, Campylobacter jejuni subsp. jejuni 51037
MARILAFDIGISSIGWAFSENDELKDCGVRIFTKAENPKTGESLALPRRLARSARKRLARRKARLNHLKHLIANEFKLNYEDYQSFDESLAKAYKGSLISPYELRFRALNELLSKQDFARVILHIVKRRGYDDIKNSDDKEKGTILKAIKQNEEKLANYQSVGEYLYKEYFQKFKENSKEFTNVRNKKESYERCIAQSFLKDELKLIFKKQREFGFSFSKKFEEEVLSVAFYKRALKDFSHLVGNCSFFTDEKRAPKNSPLAFMFVALTRIINLLNNLKNTEGILYTKDDLNTLLNEVLKNGTLTYKQTKKLLGLSDDYEFKGEKGTYFIEFKKYKEFIKALGEHNLSQDDLNEIAKDITLIKDEIKLKKALAKYDLNQNQIDSLSKLEFKDHLNISFKALKLITPLMLEGKKYDEACNELNLKVAINEDKKDFLPAFNETYYKDEVTNPVVLRAIKEYRKVLNALLKKYGKVHKINIELAREVGKNYSQRAKIEKEQNENYKAKKDAELECEKLGLKINSKNILKLRLFKEQKEFCAYSGEKIKISDLQDEKMLEIDHIYPYSRSFDDSYMNKVLVFTKQNQEKLNQTPFEAFGNDSAKWQKIEVLAKNLPTKKQKRILDKNYKDKEQKDFKDRNLNDTRYIARLVLNYTKDYLDFLPLSDDENTKLNDTQKGSKVHVEAKSGMLTSALRHTWGFSAKDRNNHLHHAIDAVIIAYANNSIVKAFSDFKKEQESNSAELYAKKISELDYKNKRKFFEPFSGFRQKVLDKIDEIFVSKPERKKPSGALHEETFRKEEEFYQSYGGKEGVLKALELGKIRKVNGKIVKNGDMFRVDIFKHKKTNKFYAVPIYTMDFALKVLPNKAVARSKKGEIKDWILMDENYEFCFSLYKDSLILIQTKDMQEPEFVYYNAFTSSTVSLIVSKHDNKFETLSKNQKILFKNANEKEVIAKSIGIQNLKVFEKYIVSALGEVTKAEFRQREDFKK

SEQ ID NO: 122 - protein, 984 aa, Campylobacter jejuni subsp. jejuni 51494
MARILAFDIGISSIGWAFSENDELKDCGVRIFTKAENPKTGESLALPRRLARSARKRLARRKARLNHLKHLIANEFKLNYEDYQSFDESLAKAYKGSLISPYELRFRALNELLSKQDFARVILHIAKRRGYDDIKNSDDKEKGAILKAIKQNEEKLANYQSVGEYLYKEYFQKFKENSKEFTNVRNKKESYERCIAQSFLKDELKLIFKKQREFGFSFSKKFEEEVLSVAFYKRALKDFSHLVGNCSFFTDEKRAPKNSPLAFMFVALTRIINLLNNLKNTEGILYTKDDLNTLLNEVLKNGTLTYKQTKKLLGLSDDYEFKGEKGTYFIEFKKYKEFIKALGEHNLSQDDLNEIAKDITLIKDEIKLKKALAKYDLNQNQIDSLSKLEFKDHLNISFKALKLITPLMLEGKKYDEACNELNLKVAINEDKKDFLPAFNETYYKDEVTNPVVLRAIKEYRKVLNALLKKYGKVHKINIELAREVGKNYSQRAKIEKEQNENYKAKKDAELECEKLGLKINSKNILKLRLFKEQKEFCAYSGEKIKISDLQDEKMLEIDHIYPYSRSFDDSYMNKVLVFTKQNQEKLNKTPFEAFGNDSTKWQKIEVLAKNLPEKKQKRILDKNYKDKEQKDFKDRNLNDTRYIARLVLNYTKDYLDFLPLSDDENTKLNDTQKGLKVHVEAKSGMLTSALRHTWGFSAKDRNNHLHHAIDAVIIAYANNSIVKAFSDFKKEQESNSAELYAKKISELDYKNKRKFFEPFSGFRQKVLDKIDEIFVSKPERKKPSGALHEETFRKEEEFYQSYGGKEGVLKALELGKIRKVNGKIVKNGDMFRVDIFKHKKTNKFYAVPIYTMDFALKVLPNKAVARSKKGEIKDWILMDENYEFCFSLYKDSLILIQTKDMQEPEFVYYNAFTSSTVSLIVSKHDNKFETLSKNQKILFKNANEKEVIAKSIGIQNLKVFEKYIVSALGEVTKAEFRQREDFKK

SEQ ID NO: 123 - protein, 987 aa, Campylobacter jejuni subsp. jejuni 53161
MARILAFDIGISSIGWAFSENDELKDCGVRIFTKAENPKTGESLALPRRLARSARKRLARRKARLNHLKHLIANEFKLNYEDYQSFDEGLAKAYKGSLISPYELRFRALNELLSKQDFARVILHIAKRRGYDDIKNNGDEEKSEILKAIKQNEEKLVNYQSVGEYLYKEYFQKFKENSKEFINVRNKKESYERCIAQSFLKDELKLIFQKQREFGFSFSKKFEEEVLSVAFYKRALKDFSHLVGNCSFFTDEKRAPKNSPLAFMFVALTRIINLLNNLKNTEGILYTKDDLNTLLNEVLKNGTLTYKQTKKLLGLSDDYEFKGEKGTYFIEFKKYKEFIKALGEHNLSQDNLNEIAKDITLIKDEIKLKKALAKYDLNQNQIDSLSKLEFKDHLNISFKALKLITPLMLEGKKYDEAYNELNLKVAINEDKKDFLPAFNETYYKDEVTNPVVLRAIKEYRKVLNALLKKYGKVHKINIELAREVGKNHSQRAKIEKEQNENYKAKKDAELECEKLGLKINSKNILKLRLFKEQKEFCAYSGEKIKISDLQDEKMLEIDHIYPYSRSFDDSYMNKVLVFTKQNQEKLNQTPFEAFGNDSAKWQKIEVLAKNLPTKKQKRILDKNYKDKEQKDFKDRNLNDTRYIARLVLNYTKDYLDFLPLSDDENTKLNDTQKGSKVHVEAKSGMLTSALRHTWGFSAKDRNNHLHHAIDAVIIAYANNSIVKAFSDFKKEQESNSAELYAKKISELDYKNKRKFFEPFSGFRQKVLDKIDEIFVSKPERKKPSGALHEETFRKEEEFYQSYGGKEGVLKALELGKIRKVNGKIVKNGDMFRVDIFKHKKTNKFYAVPIYTMDFALKVLPNKAVVQGKDKKSGLIKDWILMDENYEFCFSLYKDSLILIQTKDMQEPELVYFNAFTSSTVSLIVSKHDNKFETLSKNQKILFKNANEKEVIAKSIGIQNLKVFEKYIVSALGEVTKAEFRQREDFKK

SEQ ID NO: 124 - protein, 984 aa, Campylobacter jejuni subsp. jejuni 60004
MARILAFDIGISSIGWAFSENDELKDCGVRIFTKAENPKTGESLALPRRLARSARKRLARRKARLNHLKHLIANEFKLNYEDYQSFDESLAKAYKGSLISPYELRFRALNELLSKQDFARVILHIAKRRGYDDIKNNGDEEKGKILKAIKQNEEKLVNYQSVGEYLYKEYFQKFKENSKEFINVRNKKESYERCITQSFLKYELKLIFQKQREFGFSFSKKFEEEVLSVAFYKRALKDFSHLVGNCSFFTDEKRAPKNSPLAFMFVALTRIINILNNLKNTEGILYTKDDLNALLNEVLKNGTLTYKQTKKLLGLSDDYEFKGEKGTYFIEFKKYKEFIKALGEHNLSQDDLNEIAKDITLIKDEIKLKKALAKYDLNQNQIDSLSKLEFKDHLNISFKALKLITPLMLEGKKYDEACNELNLKVAINEDKKDFLPAFNETYYKDEVTNPVVLRAIKEYRKILNALLKKYGKVHKINIELAREVGKNHSQRAKIEKEQNENYKAKKDAEIECEKLGLKINSKNILKLRLFKEQKEFCAYSGEKIKISDLQDEKMLEIDHIYPYSRSFDDSYMNKVLVFTKQNQEKLNQTPFEAFGNDSAKWQKIEVLAKNLPTKKQKRILDKNYKDKEQKDFKDRNLNDTRYIARLVLNYTKDYLDFLPLSDDENTKLNDTQKGSKVHVEAKSGMLTSALRHTWGFSAKDRNNHLHHAIDAVIIAYANNSIVKAFSDFKKEQESNSAELYAKKISELDYKNKRKFFEPFSGFRQKVLDKIDEIFVSKPERKKPSGALHEETFRKEEEFYQSYGGKEGVLKALELGKIRKVNGKIVKNGDMFRVDIFKHKKTNKFYAVPIYTMDFALKVLPNKAVARSKKGEIKDWILMDENYEFCFSLYKDSLILIQTKDMQEPEFVYYNAFTSSTVSLIVSKHDNKFETLSKNQKILFKNANEKEVIAKSIGIQNLKVFEKYIVSALGEVTKAEFRQREDFKK

SEQ ID NO: 125 - protein, 984 aa, Campylobacter jejuni
MARILAFDIGISSIGWAFSENDELKDCGVRIFTKAENPKTGESLALPRRLARSARKRLARRKARLNHLKHLIANEFKLNYEDYQSFDESLAKAYKGSLISPYELRFRALNELLSKQDFARVILHIAKRRGYDDIKNNGDEEKSEILKAIKQNEEKLVNYQSVGEYLYKEYFQKFKENSKEFINVRNKKESYERCITQSFLKDELKLIFQKQREFGFSFSKKFEEEVLSVAFYKRALKDFSHLVGNCSFFTDEKRAPKNSPLAFMFVALTRIINILNNLKNTEGILYTKDDLNALLNEVLKNGTLTYKQTKKLLGLSDDYEFKGEKGTYFIEFKKYKEFIKALGEHNLSQDDLNEIAKDITLIKDEIKLKKALAKYDLNQNQIDSLSKLEFKDHLNISFKALKLITPLMLEGKKYDEACNELNLKVAINEDKKDFLPAFNETYYKDEVTNPVVLRAIKEYRKILNALLKKYGKVHKINIELAREVGKNHSQRAKIEKEQNENYKAKKDAEIECEKLGLKINSKNILKLRLFKEQKEFCAYSGEKIKLSDLQDEKMLEIDHIYPYSRSFDDSYMNKVLVFTKQNQEKLNKTPFEAFGNDSTKWQKIEVLAKNLPEKKQKRILDKNYKDKEQKDFKDRNLNDTRYIARLVLNYTKDYLDFLPLSDDENTKLNDTQKGSKVHVEAKSGMLTSALRHTWGFSAKDRNNHLHHAIDAAIIAYANNSIVKAFSDFKKEQESNSVELYAKKISELDYKNKRKFFEPFSGFRQKVLDKIDEIFVSKPERKKPSGALHEETFRKEEEFYQSYGGKEGVLKALELGKIRKVNGKIVKNGDMFRVDIFKHKKTNKFYAVPIYTMDFALKVLPNKAVARSKKGEIKDWILMDENYEFCFSLYKDSLILIQTKDMQEPELVYFNAFTSSTVSLIVSKHDNKFETLSKNQKILFKNANEKEVIAKSIGIQNLKVFEKYIVSALGEVTKAEFRQREDFKK

SEQ ID NO: 126 - protein, 984 aa, Campylobacter jejuni subsp. jejuni 84-25
MVRILAFDIGISSIGWAFSENDELKDCGVRIFTKVENPKTGESLALPRRLARSARKRLARRKARLNHLKHLIANEFKLNYEDYQSFDESLAKAYKGSLISPYELRFRALNELLSKQDFARVILHIAKRRGYDDIKNSDDKEKGAILKAIKQNEEKLANYQSVGEYLYKEYFQKFKENSKEFTNVRNKKESYERCIAQSFLKDELKLIFKKQREFGFSFSKKFEEEVLSVAFYKRALKDFSHLVGNCSFFTDEKRAPKNSPLAFMFVALTRIINLLNNLKNTEGILYTKDDLNALLNEVLKNGTLTYKQTKKLLGLSDDYEFKGEKGTYFIEFKKYKEFIKALGEHNLSQDDLNEIAKDITLIKDEIKLKKALAKYDLNQNQIDSLSKLEFKDHLNISFKALKLITPLMLEGKKYDEACNELNLKVAINEDKKDFLPAFNETYYKDEVTNPVVLRAIKEYRKVLNALLKKYGKVHKINIELAREVGKNHSQRAKIEKEQNENYKAKKDAELECEKLGLKINSKNILKLRLFKEQKEFCAYSGEKIKISDLQDEKMLEIDHIYPYSRSFDDSYMNKVLVFTKQNQEKLNKTPFEAFGNDSAKWQKIEVLAKNLPTKKQKRILDKNYKDKEQKDFKDRNLNDTRYIARLVLNYTKDYLDFLPLSDDENTKLNDTQKGSKVHVEAKSGMLTSALRHTWGFSTKDRNNHLHHAIDAVIIAYANNSIVKAFSDFKKEQESNSAELYAKKISELDYKNKRKFFEPFSGFRQKVLDKIDEIFVSKPERKKPSGALHEETFRKEEEFYQSYGGKEGVLKALELGKIRKVNGKIVKNGDMFRVDIFKHKKTNKFYAVPIYTMDFALKVLPNKAVARSKKGEIKDWILMDENYEFCFSLYKDSLILIQTKDMQEPEFVYYNAFTSSTVSLIVSKHDNKFETLSKNQKILFKNANEKEVIAKSIGIQNLKVFEKYIVSALGEVTKAEFRQREDFKK

SEQ ID NO: 127 - protein, 984 aa, Campylobacter jejuni subsp. jejuni 87459
MARILAFDIGISSIGWAFSENDELKDCGVRIFTKAENPKTGESLALPRRLARSARKRLARRKARLNHLKHLIANEFKLNYEDYQSFDESLAKAYKGSLISPYELRFRALNELLSKQDFARVILHIAKRRGYDDIKNSDDKEKGAILKAIKQNEEKLANYQSVGEYLYKEYFQKFKENSKEFTNVRNKKESYERCIAQSFLKDELKLIFKKQREFGFSFSKKFEEEVLSVAFYKRALKDFSHLVGNCSFFTDEKRAPKNSPLAFMFVALTRIINLLNNLKNTEGILYTKDDLNTFLNEVLKNGTLTYKQTKKLLGLSDDYEFKGEKGTYFIEFKKYKEFIKALGDHNLSQDDLNEIAKDITLIKDEIKLKKALAKYDLNQNQIDSLSKLEFKDHLNISFKALKLITPLMLEGKKYDEACNELNLKVAINEDKKDFLPAFNETYYKDEVTNPVVLRAIKEYRKVLNALLKKYGKVHKINIELAREVGKNHSQRAKIEKEQNENYKAKKDAELECEKLGLKINSKNILKLRLFKEQKEFCAYSGEKIKISDLQDEKMLEIDHIYPYSRSFDDSYMNKVLVFTKQNQEKLNKTPFEAFGNDSAKWQKIEVLAKNLPTKKQKRILDKNYKDKEQKDFKDRNLNDTRYIARLVLNYTKDYLDFLPLSDDENTKLNDTQKGSKVHVEAKSGMLTSALRHTWGFSTKDRNNHLHHAIDAVIIAYANNSIVKAFSDFKKEQESNSAELYAKKISELDYKNKRKFFEPFSGFRQKVLDKIDEIFVSKPERKKPSGALHEETFRKEEEFYQSYGGKEGVLKALELGKIRKVNGKIVKNGDMFRVDIFKHKKTNKFYAVPIYTMDFALKVLPNKAVARSKKGEIKDWILMDENYEFCFSLYKDSLILIQTKDMQEPEFVYYNAFTSSTVSLIVSKHDNKFETLSKNQKILFKNANEKEVIAKSIGIQNLKVFEKYIVSALGEVTKAEFRQREDFKK

SEQ ID NO: 128 - protein, 984 aa, Campylobacter jejuni subsp. jejuni ATCC 33560
MARILAFDIGISSIGWAFSENDELKDCGVRIFTKAENPKTGESLALPRRLARSARKRLARRKARLNHLKHLIANEFKLNYEDYQSFDESLAKAYKGSLISPYELRFRALNELLSKQDFARVILHIAKRRGYDDIKNSDDKEKGAILKAIKQNEEKLANYQSVGEYLYKEYFQKFKENSKEFTNVRNKKESYERCIAQSFLKDELKLIFKKQREFGFSFSKKFEEEVLSVAFYKRALKDFSHLVGNCSFFTDEKRAPKNSPLAFMFVALTRIINLLNNLKNTEGILYTKDDLNALLNEVLKNGTLTYKQTKKLLGLSDDYEFKGEKGTYFIEFKKYKEFIKALGDHSLSQDDLNEIAKDITLIKDEIKLKKALAKYDLNQNQIDSLSKLEFKDHLNISFKALKLITPLMLEGKKYDEACNELNLKVAINEDKKDFLPAFNETYYKDEVTNPVVLRAIKEYRKVLNALLKKYGKVHKINIELAREVGKNYSQRAKIEKEQNENYKAKKDAELECEKLGLKINSKNILKLRLFKEQKEFCAYSGEKIKISDLQDEKMLEIDHIYPYSRSFDDSYMNKVLVFTKQNQEKLNQTPFEAFGNDSAKWQKIEVLAKNLPTKKQKRILDKNYKDKEQKNFKDRNLNDTRYIARLVLNYTKDYLDFLPLSDDENTKLNDTQKGSKVHVEAKSGMLTSALRHTWGFSAKDRNNHLHHTIDAVIIAYANNSIVKAFSDFKKEQESNSAELYAKKISELDYKNKRKFFEPFSGFRQKVLDKIDEIFVSKPERKKPSGALHEETFRKEEEFYQSYGGKEGVLKALELGKIRKVNGKIVKNGDMFRVDIFKHKKTNKFYAVPIYTMDFALKVLPNKAVARSKKGEIKDWILMDENYEFCFSLYKDSLILIQTKDMQEPEFVYYNAFTSSTVSLIVSKHDNKFETLSKNQKILFKNANEKEVIAKSIGIQNLKVFEKYIVSALGEVTKAEFRQREDFKK

SEQ ID NO: 129 - protein, 987 aa, Campylobacter jejuni subsp. jejuni CF93-6
MARILAFDIGISSIGWAFSENDELKDCGVRIFTKVENPKTGESLALPRRLARSARKRLARRKARLNHLKHLIANEFKLNYEDYQSFDESLAKAYKGSLISPYELRFRALNELLSKQDFARVILHIAKRRGYDDIKNSDDKEKGAILKAIKQNEEKLANYQSVGEYLYKEYFQKFKENSKEFTNVRNKKESYERCIAQSFLKDELKLIFKKQREFGFSFSKKFEEEVLSVAFYKRALKDFSHLVGNCSFFTDEKRVPKNSPLAFMFVALTRIINLLNNLKNTEGILYTKDDLNALLNEVLKNGTLTYKQTKKLLGLSDDYEFKGEKGTYFIEFKKYKEFIKALGEHNLSQDDLNEIAKDITLIKDEIKLKKALAKYDLNQNQIDSLSKLEFKDHLNISFKALKLITPLMLEGKKYDEACNELNLKVAINEDKKDFLPAFNETYYKDEVTNPVVLRAIKEYRKVLNALLKKYGKVHKINIELAREVGKNHSQRAKIEKEQNENYKAKKDAELECEKLGLKINSKNILKLRLFKEQKEFCAYSGEKIKISDLQDEKMLEIDHIYPYSRSFDDSYMNKVLVFTKQNQEKLNQTPFEAFGNDSAKWQKIEVLAKNLPTKKQKRILDKNYKDKEQKNFKDRNLNDTRYIARLVLNYTKDYLDFLPLSDDENTKLNDTQKGSKVHVEAKSGMLTSALRHTWGFSAKDRNNHLHHAIDAVIIAYANNSIVKAFSDFKKEQESNSAELYAKKISELDYKNKRKFFEPFSGFRQKVLDKIDEIFVSKPERKKPSGALHEETFRKEEEFYQSYGGKEGVLKALELGKIRKVNGKIVKNGDMFRVDIFKHKKTNKFYGVPIYTMDFALKVLPNKAVARSKKGEIKDWILMDENYEFCFSLYKDSLILIQTKDMQEPEFVYYNAFTSSTVSLIVSKHDNKFETLSKNQKILFKNANEKEVIAKSIGIQNLKVFEKYIVSALGEVTKAEFRQREDFKNELR

SEQ ID NO: 130 - protein, 984 aa, Campylobacter jejuni subsp. jejuni CG8486
MARILAFDIGISSIGWAFSENDELKDCGVRIFTKAENPKTGESLALPRRLARSARKRLARRKARLNHLKHLIANEFKLNYEDYQSFDESLAKAYKGSLISPYELRFRALNELLSKQDFARVILHIAKRRGYDDIKNSDDKEKGAILKAIKQNEEKLANYQSVGEYLYKEYFQKFKENSKEFTNVRNKKESYERCIAQSFLKDELKLIFKKQREFGFSFSKKFEEEVLSVAFYKRALKDFSHLVGNCSFFTDEKRAPKNSPLAFMFVALTRIINLLNNLKNTEGILYTKDDLNALLNEVLKNGTLTYKQTKKLLGLSDDYEFKGEKGTYFIEFKKYKEFIKALGDHSLSQDDLNEIAKDITLIKDEIKLKKALAKYDLNQNQIDSLSKLEFKDHLNISFKALKLITPLMLEGKKYDEACNELNLKVAINEDKKDFLPAFNETYYKDEVTNPVVLRAIKEYRKVLNALLKKYGKVHKINIELAREVGKNYSQRAKIEKEQNENYKAKKDAELECEKLGLKINSKNILKLRLFKEQKEFCAYSGEKIKISDLQDEKMLEIDHIYPYSRSFDDSYMNKVLVFTKQNQEKLNQTPFEAFGNDSAKWQKIEVLAKNLPTKKQKRILDKNYKDKEQKDFKDRNLNDTRYIARLVLNYTKDYLDFLPLSDDENTKLNDTQKGSKVHVEAKSGMLTSALRHTWGFSAKDRNNHLHHAIDAVIIAYANNSIVKAFSDFKKEQESNSAELYAKKISELDYKNKRKFFEPFSGFRQKVLDKIDEIFVSKPERKKPSGALHEETFRKEEEFYQSYGGKEGVLKALELGKIRKVNGKIVKNGDMFRVDIFKHKKTNKFYAVPIYTMDFALKVLPNKAVARSKKGEIKDWILMDENYEFCFSLYKDSLILIQTKDMQEPEFVYYNAFTSSTVSLIVSKHDNKFETLSKNQKILFKNANEKEVIAKSIGIQNLKVFEKYIVSALGEVTKAEFRQREDFKK

SEQ ID NO: 131 - protein, 984 aa, Campylobacter jejuni subsp. jejuni HB93-13
MARILAFDIGISSIGWAFSENDELKDCGVRIFTKVENPKTGESLALPRRLARSARKRLARRKARLNHLKHLIANEFKLNYEDYQSFDESLAKAYKGSLISPYELRFRALNELLSKQDFARVILHIAKRRGYDDIKNSDDKEKGAILKAIKQNEEKLANYQSVGEYLYKEYFQKFKENSKEFTNVRNKKESYERCIAQSFLKDELKLIFKKQREFGFSFLKKFEEEVLSVAFYKRALKDFSHLVGNCSFFTDEKRAPKNSPLAFMFVALTRIINLLNNLKNTEGILYTKDDLNALLNEVLKNGTLTYKQTKKLLGLSDDYEFKGEKGTYFIEFKKYKEFIKALGEHNLSQDDLNEIAKDITLIKDEIKLKKALAKYDLNQNQIDSLSKLEFKDHLNISFKALKLITPLMLEGKKYDEAYNELNLKVAINEDKKDFLPAFNETYYKDEVTNPVVLRAIKEYRKVLNALLKKYGKVHKINIELAREVGKNHSQRAKIEKEQNENYKAKKDAELECEKLGLKINSKNILKLRLFKEQKEFCAYSGEKIKISDLQDEKMLEIDHIYPYSRSFDDSYMNKVLVFTKQNQEKLNQTPFEAFGNDSAKWQKIEVLAKNLPTKKQKRILDKNYKDKEQKDFKDRNLNDTRYIARLVLNYTKDYLDFLPLSDDENTKLNDTQKGSKVHVEAKSGMLTSALRHTWGFSAKDRNNHLHHAIDAVIIAYANNSIVKAFSDFKKEQESNSAELYAKKISELDYKNKRKFFEPFSGFRQKVLDKIDEIFVSKPERKKPSGALHEETFRKEEEFYQSYGGKEGVLKALELGKIRKVNGKIVKNGDMFRVDIFKHKKTNKFYAVPIYTMDFALKVLPNKAVARSKKGEIKDWILMDENYEFCFSLYKDSLILIQTKDMQEPELVYFNAFTSSTVSLIVSKHDNKFETLSKNQKILFKNANEKEVIAKSIGIQNLKVFEKYIVSALGEVTKAEFRQREDFKK

SEQ ID NO: 132 - protein, 987 aa, Campylobacter jejuni subsp. jejuni LMG 23210
MARILAFDIGISSIGWAFSENDELKDCGVRIFTKAENPKTGESLALPRRLARSARKRLARRKARLNHLKHLIANEFKLNYEDYQSFDESLAKAYKGSLISPYELRFRALNELLSKQDFARVILHIAKRRGYDDIKNSDDKEKGAILKAIKQNEEKLANYQSVGEYLYKEYFQKFKENSKEFTNVRNKKESYERCIAQSFLKDELKLIFKKQREFGFSFSKKFEEEVLSVAFYKRALKDFSHLVGNCSFFTDEKRAPKNSPLAFMFVALTRIINLLNNLKNTEGILYTKDDLNALLNEVLKNGTLTYKQTKKLLGLSDDYEFKGEKGTYFIEFKKYKEFIKALGDHSLSQDDLNEIAKDITLIKDEIKLKKALVKYDLNQNQIDSLSKLEFKDHLNISFKALKLITPLMLEGKKYDEACNELNLKVAINEDKKDFLPAFNETYYKDEVTNPVVLRAIKEYRKVLNALLKKYGKVHKINIELAREVGKNYSQRAKIEKEQNENYKAKKDAELECEKLGLKINSKNILKLRLFKEQKEFCAYSGEKIKISDLQDEKMLEIDHIYPYSRSFDDSYMNKVLVFTKQNQEKLNQTPFEAFGNDSAKWQKIEVLAKNLPTKKQKRILDKNYKDKEQKDFKDRNLNDTRYIARLVLNYTKDYLDFLPLSDDENTKLNDTQKGSKVHVEAKSGMLTSALRHTWGFSAKDRNNHLHHAIDAVIIAYANNSIVKAFSDFKKEQESNSAELYAKKISELDYKNKRKFFEPFSGFRQKVLDKIDEIFVSKPERKKPSGALHEETFRKEEEFYQSYGGKEGVLKALELGKIRKVNGKIVKNGDMFRVDIFKHKKTNKFYAVPIYTMDFALKVLPNKAVARSKKGEIKDWILMDENYEFCFSLYKDSLILIQTKDMQEPELVYFNAFTSSTVSLIVSKHDNKFETLSKNQKILFKNANEKEVIAKSIGIQNLKVFEKYIVSALGEVTKAEFRQREDFKNELR

SEQ ID NO: 133 - protein, 984 aa, Campylobacter jejuni subsp. jejuni LMG 23211
MARILAFDIGISSIGWAFSENDELKDCGVRIFTKAENPKTGESLALPRRLARSARKRLARRKARLNHLKHLIANEFKLNYEDYQSFDESLAKAYKGSLISPYELRFRALNELLSKQDFARVILHIAKRRGYDDIKNNGDEEKSEILKAIKQNEEKLVNYQSVGEYLYKEYFQKFKENSKEFINVRNKKESYERCITQSFLKDELKLIFQKQREFGFSFSKKFEEEVLSVAFYKRALKDFSHLVGNCSFFTDEKRAPKNSPLAFMFVALTRIINLLNNLKNTEGILYTKDDLNALLNEVLKNGTLTYKQTKKLLGLSDDYEFKGEKGTYFIEFKKYKEFIKALDEHSLSQDDLNEIAKDITLIKDEIKLKKALAKYDLNQNQIDSLSKLEFKDHLNISFKALKLITPLMLEGKKYDEACNELNLKVAINEDKKDFLPAFNETYYKDEVTNPVVLRAIKEYRKILNALLKKYGKVHKINIELAREVGKNHSQRAKIEKEQNENYKAKKDAEIECEKLGLKINSKNILKLRLFKEQKEFCAYSGEKIKISDLQDEKMLEIDHIYPYSRSFDDSYMNKVLVFTKQNQEKLNKTPFEAFGNDGVKWQKIEVLAKNLPEKKQKRILDKNYKDKEQKDFKDRNLNDTRYIARLVLNYTKDYLDFLPLSDDENTKLNDTQKGSKVHVEAKSGMLTSALRHTWGFSTKDRNNHLHHAIDAAIIAYANNSIVKAFSDFKKEQESNSAELYAKKISELDYKNKRKFFEPFSGFRQKVLDKIDEIFVSKPERKKPSGALHEETFRKEEEFYQSYGGKEGVLKALELGKIRKVNGKIVKNGDMFRVDIFKHKKTNKFYAVPIYTMDFALKVLPNKAVARSKKGEIKDWILMDENYEFCFSLYKDSLILIQTKDMQEPELVYFNAFTSSTVSLVVSKHDNKFETLSKNQKILFKNANEKEVIAKSIGIQNLKVFEKYIVSALGEVTKAEFRQREDFKK

SEQ ID NO: 134 - protein, 984 aa, Campylobacter jejuni subsp. jejuni LMG 23263
MARILAFDIGISSIGWAFSENDELKDCGVRIFTKAENPKTGESLALPRRLARSARKRLARRKARLNHLKHLIANEFKLNYEDYQSFDESLAKAYKGSLISPYELRFRALNELLSKQDFARVILHIVKRRGYDDIKNSDDKEKGAILKAIKQNEEKLANYQSVGEYLYKEYFQKFKENSKEFTNVRNKKESYERCIAQSFLKDELKLIFKKQREFGFSFSKKFEEEVLSVAFYKRALKDFSHLVGNCSFFTDEKRAPKNSPLAFMFVALTRIINLLNNLKNTEGILYTKDDLNTLLNEVLKNGTLTYKQTKKLLGLSDDYEFKGEKGTYFIEFKKYKEFIKALGDHSLSQDDLNEIAKDITLIKDEIKLKKALAKYDLNQNQIDSLSKLEFKDHLNISFKALKLITPLMLEGKKYDEACNELNLKVAINEDKKDFLPAFNETYYKDEVTNPVVLRAIKEYRKVLNALLKKYGKVHKINIELAREVGKNHSQRAKIEKEQNENYKAKKDAEFECEKLGLKINSKNILKLRLFKEQKEFCAYSGEKIKISDLQDEKMLEIDHIYPYSRSFDDSYMNKVLVFTKQNQEKLNKTPFEAFGNDSAKWQKIEVLAKNLPTKKQKRILDKNYKDKEQKDFKDRNLNDTRYIARLVLNYTKDYLDFLPLSDDENTKLNDTQKGSKVHVEAKSGMLTSALRHTWGFSTKDRNNHLHHAIDAVIIAYANNSIVKAFSDFKKEQESNSAELYAKKISELDYKNKRKFFEPFSGFRQKVLDKIDEIFVSKPERKKPSGALHEETFRKEEEFYQSYGGKEGVLKALELGKIRKVNGKIVKNGDMFRVDIFKHKKTNKFYAVPIYTMDFALKVLPNKAVARSKKGEIKDWILMDENYEFCFSLYKDSLILIQTKDMQEPEFVYYNAFTSSTVSLIVSKHDNKFETLSKNQKILFKNANEKEVIAKSIGIQNLKVFEKYIVSALGEVTKAEFRQREDFKK

SEQ ID NO: 135 - protein, 984 aa, Campylobacter jejuni subsp. jejuni LMG 23264
MARILAFDIGISSIGWAFSENDELKDCGVRIFTKVENPKTGESLALPRRLARSARKRLARRKARLNHLKHLIANEFKLNYEDYQSFDESLAKAYKGSLISPYELRFRALNELLSKQDFARVILHIAKRRGYDDIKNSDDKEKGAILKAIKQNEEKLANYQSVGEYLYKEYFQKFKENSKEFTNVRNKKESYERCIAQSFLKDELKLIFKKQREFGFSFSKKFEEEVLSVAFYKRALKDFSHLVGNCSFFTDEKRAPKNSPLAFMFVALTRIINLLNNLKNTEGILYTKDDLNALLNEVLKNGTLTYKQTKKLLGLSDDYEFKGEKGTYFIEFKKYKEFIKALGEHNLSQDDLNEIAKDITLIKDEIKLKKALAKYDLNQNQIDSLSKLEFKDHLNISFKALKLITPLMLEGKKYDEACNELNLKVAINEDKKDFLPAFNETYYKDEVTNPVVLRAIKEYRKVLNALLKKYGKVHKINIELAREVGKNHSQRAKIEKEQNENYKAKKDAELECEKLGLKINSKNILKLRLFKEQKEFCAYSGEKIKISDLQDEKMLEIDHIYPYSRSFDDSYMNKVLVFTKQNQEKLNKTPFEAFGNDSAKWQKIEVLAKNLPTKKQKRILDKNYKDKEQKDFKDRNLNDTRYIARLVLNYTKDYLDFLPLSNDENTKLNDTQKGSKVHVEAKSGMLTSALRHTWGFSTKDRNNHLHHAIDAVIIAYANNSIVKAFSDFKKEQESNSAELYAKKISELDYKNKRKFFEPFSGFRQKVLDKIDEIFVSKPERKKPSGALHEETFRKEEEFYQSYGGKEGVLKALELGKIRKVNGKIVKNGDMFRVDIFKHKKTNKFYAVPIYTMDFALKVLPNKAVARSKKGEIKDWILMDENYEFCFSLYKDSLILIQTKDMQEPEFVYYNAFTSSTVSLIVSKHDNKFETLSKNQKILFKNANEKEVIAKSIGIQNLKVFEKYIVSALGEVTKAEFRQREDFKK

SEQ ID NO: 136 - protein, 987 aa, Campylobacter jejuni subsp. jejuni LMG 23269
MARILAFDIGISSIGWAFSENDELKDCGVRIFTKAENPKTGESLALPRRLARSARKRLARRKARLNHLKHLIANEFKLNYEDYQSFDESLAKAYKGSLISPYELRFRALNELLSKQDFARVILHIAKRRGYDDIKNNGDEEKSEILKAIKQNEEKLVNYQSVGEYLYKEYFQKFKENSKEFINVRNKKESYERCIAQSFLKDELKLIFQKQREFGFSFSKKFEEEVLSVAFYKRALKDFSHLVGNCSFFTDEKRAPKNSPLAFMFVALTRIINLLNNLKNTEGILYTKDDLNTLLNEVLKNGTLTYKQTKKLLGLSDDYEFKGEKGTYFIEFKKYKEFIKALGEHNLSQDNLNEIAKDITLIKDEIKLKKALAKYDLNQNQIDSLSKLEFKDHLNISFKALKLITPLMLEGKKYDEAYNELNLKVAINEDKKDFLPAFNETYYKDEVTNPVVLRAIKEYRKVLNALLKKYGKVHKINIELAREVGKNHSQRAKIEKEQNENYKAKKDAELECEKLGLKINSKNILKLRLFKEQKEFCAYSGEKIKISDLQDEKMLEIDHIYPYSRSFDDSYMNKVLVFTKQNQEKLNQTPFEAFGNDSAKWQKIEVLAKNLPTKKQKRILDKNYKDKEQKDFKDRNLNDTRYIARLVLNYTKDYLDFLPLSDDENTKLNDTQKGSKVHVEAKSGMLTSALRHTWGFSAKDRNNHLHHAIDAVIIAYANNSIVKAFSDFKKEQESNSAELYAKKISELDYKNKRKFFEPFSGFRQKVLDKIDEIFVSKPERKKPSGALHEETFRKEEEFHQSYGGKEGVLKALELGKIRKVNGKIVKNGDMFRVDIFKHKKTNKFYAVPIYTMDFALKVLPNKAVVQGKDKKSGLIKDWILMDENYEFCFSLYKDSLILIQTKDMQEPELVYFNAFTSSTVSLIVSKHDNKFETLSKNQKILFKNANEKEVIAKSIGIQNLKVFEKYIVSALGEVTKAEFRQREDFKK

SEQ ID NO: 137 - protein, 987 aa, Campylobacter jejuni subsp. jejuni LMG 23357
MARILAFDIGISSIGWAFSENDELKDCGVRIFTKAENPKTGESLALPRCLARSARKRLARRKARLNHLKHLIANEFKLNYEDYQSFDESLAKAYKGSLISPYELRFRALNELLSKQDFARVILHIAKRRGYDDIKNNGDEEKGEILKAIKQNEEKLVSYQSVGEYLYKEYFQKFKENSKEFINVRNKKESYERCIAQSFLKDELKLIFQKQRKFGFSFSKKFEEEVLSVAFYKRALKDFSHLVGNCSFFTDEKRAPKNSPLAFMFVALTRIINLLNNLKNTEGILYTKDDLNTLLNEVLKNGTLTYKQTKKLLGLSNDYEFKGEKGTYFIEFQKYKEFVKALGEHNLSQDDLNEIAKDITLIKDEIKLKKALAKYDLNQNQIDSLSKLEFKDHLNISFKALKLITPLMLEGKKYDEACNELNLKVAINEDKKDFLPAFNETYYKDEVTNPVVLRAIKEYRKVLNALLKKYGKVHKINIELAREVGKNHSQRAKIEKEQNENYKAKKDAELECEKLGLKINSKNILKLRLFKEQKEFCVYSGEKIKISDLQDEKMLEIDHIYPYSRSFDDSYMNKVLVFTKQNQEKLNKTPFETFGNDRVKWQKIEVLAKNLPTKKQKRILDKNYKDKEQKDFKDRNLNDTRYIARLVLNYTKDYLDFLPLSDDENTKLNDTQKGSKVHVEAKSGMLTSTLRHTWGFSTKDRNNHLHHAIDAAIIAYANNSIVKAFSDFKKEQESNTAELYAKKISELDYKNKRKFFEPFSGFRQKLLDKIDEIFVSKPERKKPSGALHEETFRKEEEFYQSYGGKEGVLKALELGKIRKVNGKIVSNGDMFRVDIFKHKKTNKFYAVPIYTMDFALKVLPNKAVVQGKDKKSGLIKDWILMDENYEFCFSLYKDSLILIQTKDMQEPELVYYERLDSSNASLTVSKHDNKFETLSKNQKILFKNANEKEVIAKSIGIQNLKVFEKYIVSALGEVTKAEFRQREDFKK

SEQ ID NO: 138 - protein, 984 aa, Campylobacter jejuni subsp. jejuni NCTC 11168 = ATCC 700819
MARILAFDIGISSIGWAFSENDELKDCGVRIFTKVENPKTGESLALPRRLARSARKRLARRKARLNHLKHLIANEFKLNYEDYQSFDESLAKAYKGSLISPYELRFRALNELLSKQDFARVILHIAKRRGYDDIKNSDDKEKGAILKAIKQNEEKLANYQSVGEYLYKEYFQKFKENSKEFTNVRNKKESYERCIAQSFLKDELKLIFKKQREFGFSFSKKFEEEVLSVAFYKRALKDFSHLVGNCSFFTDEKRAPKNSPLAFMFVALTRIINLLNNLKNTEGILYTKDDLNALLNEVLKNGTLTYKQTKKLLGLSDDYEFKGEKGTYFIEFKKYKEFIKALGEHNLSQDDLNEIAKDITLIKDEIKLKKALAKYDLNQNQIDSLSKLEFKDHLNISFKALKLVTPLMLEGKKYDEACNELNLKVAINEDKKDFLPAFNETYYKDEVTNPVVLRAIKEYRKVLNALLKKYGKVHKINIELAREVGKNHSQRAKIEKEQNENYKAKKDAELECEKLGLKINSKNILKLRLFKEQKEFCAYSGEKIKISDLQDEKMLEIDHIYPYSRSFDDSYMNKVLVFTKQNQEKLNQTPFEAFGNDSAKWQKIEVLAKNLPTKKQKRILDKNYKDKEQKNFKDRNLNDTRYIARLVLNYTKDYLDFLPLSDDENTKLNDTQKGSKVHVEAKSGMLTSALRHTWGFSAKDRNNHLHHAIDAVIIAYANNSIVKAFSDFKKEQESNSAELYAKKISELDYKNKRKFFEPFSGFRQKVLDKIDEIFVSKPERKKPSGALHEETFRKEEEFYQSYGGKEGVLKALELGKIRKVNGKIVKNGDMFRVDIFKHKKTNKFYAVPIYTMDFALKVLPNKAVARSKKGEIKDWILMDENYEFCFSLYKDSLILIQTKDMQEPEFVYYNAFTSSTVSLIVSKHDNKFETLSKNQKILFKNANEKEVIAKSIGIQNLKVFEKYIVSALGEVTKAEFRQREDFKK

SEQ ID NO: 139 - protein, 983 aa, Campylobacter jejuni subsp. jejuni NW
MARILAFDIGISSIGWAFSENDELKDCGVRIFTKAENPKTGESLALPRRLARSARKRLARRKARLNHLKHLIANEFKLNYEDYQSFDESLAKAYKGSLISPYELRFRALNELLSKQDFARVILHIAKRRGYDDIKNSDDKEKGAILKAIKQNEEKLANYQSVGEYLYKEYFQKFKENSKEFTNVRNKKESYERCIAQSFLKDELKLIFKKQREFGFSFSKKFEEEVLSVAFYKRALKDFSHLVGNCSFFTDEKRAPKNSPLAFMFVALTRIINLLNNLKNTEGILYTKDDLNALLNEVLKNGTLTYKQTKKLLGLSDDYEFKGEKGTYFIEFKKYKEFIKALGEHNLSQDDLNEIAKDITLIKDEIKLKKALAKYDLNQNQIDSLSKLEFKDHLNISFKALKLVTPLMLEGKKYDEACNELNLKVAINEDKKDFLPAFNETYYKDEVTNPVVLRAIKEYRKVLNALLKKYGKVHKINIELAREVGKNHSQRAKIEKEQNENYKAKKDAELECEKLGLKINSKNILKLRLFKEQKEFCAYSGEKIKISDLQDEKMLEIDHIYPYSRSFDDSYMNKVLVFTKQNQEKLNQTPFEAFGNDSAKWQKIEVLAKNLPTKKQKRILDKNYKDKEQKNFKDRNLNDTRYIARLVLNYTKDYLDFLPLSDDENTKLNDTQKGSKVHVEAKSGMLTSALRHTWGFSAKDRNNHLHHAIDAVIIAYANNSIVKAFSDFKKEQESNSAELYAKKISELDYKNKRKFFEPFSGFRQKVLDKIDEIFVSKPERKKPSGALHEETFRKEEFYQSYGGKEGVLKALELGKIRKVNGKIVKNGDMFRVDIFKHKKTNKFYAVPIYTMDFALKVLPNKAVARSKKGEIKDWILMDENYEFCFSLYKDSLILIQTKDMQEPEFVYYNAFTSSTVSLIVSKHDNKFETLSKNQKILFKNANEKEVIAKSIGIQNLKVFEKYIVSALGEVTKAEFRQREDFKK

SEQ ID NO: 140 - protein, 987 aa, Campylobacter jejuni
MARILAFDIGISSIGWAFSENDELKDCGVRIFTKAENPKTGESLALPRRLARSARKRLARRKARLNHLKHLIANEFKLNYEDYQSFDESLAKAYKGSLISPYELRFRALNELLSKQDFARVILHIAKRRGYDDIKNNGDEEKSEILKAIKQNEEKLVNYQSVGEYLYKEYFQKFKENSKEFINVRNKKESYERCIAQSFLKDELKLIFQKQREFGFSFSKKFEEEVLSVAFYKRALKDFSHLVGNCSFFTDEKRAPKNSPLAFMFVALTRIINLLNNLKNTEGILYTKDDLNTLLNEVLKNGTLTYKQTKKLLGLSDDYEFKGEKGTYFIEFKKYKEFIKALGEHNLSQDNLNEIAKDITLIKDEIKLKKALAKYDLNQNQIDSLSKLEFKDHLNISFKALKLITPLMLEGKKYDEAYNELNLKVAINEDKKDFLPAFNETYYKDEVTNPVVLRAIKEYRKVLNALLKKYGKVHKINIELAREVGKNHSQRAKIEKEQNENYKAKKDAELECEKLGLKINSKNILKLRLFKEQKEFCAYSGEKIKISDLQDEKMLEIDHIYPYSRSFDDSYMNKVLVFTKQNQEKLNQTPFEAFGNDSAKWQKIEVLAKNLPTKKQKRILDKNYKDKEQKDFKDRNLNDTRYIARLVLNYTKDYLDFLPLSDDENTKLNDTQKGSKVHVEAKSGMLTSALRHTWGFSAKDRNNHLHHAIDAVIIAYANNSIVKAFSDFKKEQESNSAELYAKKISELDYKNKRKFFEPFSGFRQKVLDKIDEIFVSKPERKKPSGALHEETFRKEEEFYQSYGGKEGVLKALELGKIRKVNGKIVKNGDMFRVDIFKHKKTNKFYPVPIYTMDFALKVLPNKAVVQGKDKKSGLIKDWILMDENYEFCFSLYKDSLILIQTKDMQEPELVYFNAFTSSTVSLIVSKHDNKFETLSKNQKILFKNANEKEVIAKSIGIQNLKVFEKYIVSALGEVTKAEFRQREDFKK

SEQ ID NO: 141 - protein, 1003 aa, Campylobacter lari
MRILGFDIGINSIGWAFVENDELKDCGVRIFTKAENPKNKESLALPRRNARSSRRRLKRRKARLIAIKRILAKELKLNYKDYVAADGELPKAYEGSLASVYELRYKALTQNLETKDLARVILHIAKHRGYMNKNEKKSNDAKKGKILSALKNNALKLENYQSVGEYFYKEFFQKYKKNTKNFIKIRNTKDNYNNCVLSSDLEKELKLILEKQKEFGYNYSEDFINEILKVAFFQRPLKDFSHLVGACTFFEEEKRACKNSYSAWEFVALTKIINEIKSLEKISGEIVPTQTINEVLNLILDKGSITYKKFRSCINLHESISFKSLKYDKENAENAKLIDFRKLVEFKKALGVHSLSRQELDQISTHITLIKDNVKLKTVLEKYNLSNEQINNLLEIEFNDYINLSFKALGMILPLMREGKRYDEACEIANLKPKTVDEKKDFLPAFCDSIFAHELSNPVVNRAISEYRKVLNALLKKYGKVHKIHLELARDVGLSKKAREKIEKEQKENQAVNAWALKECENIGLKASAKNILKLKLWKEQKEICIYSGNKISIEHLKDEKALEVDHIYPYSRSFDDSFINKVLVFTKENQEKLNKTPFEAFGKNIEKWSKIQTLAQNLPYKKKNKILDENFKDKQQEDFISRNLNDTRYIATLIAKYTKEYLNFLLLSENENANLKSGEKGSKIHVQTISGMLTSVLRHTWGFDKKDRNNHLHHALDAIIVAYSTNSIIKAFSDFRKNQELLKARFYAKELTSDNYKHQVKFFEPFKSFREKILSKIDEIFVSKPPRKRARRALHKDTFHSENKIIDKCSYNSKEGLQIALSCGRVRKIGTKYVENDTIVRVDIFKKQNKFYAIPIYAMDFALGILPNKIVITGKDKNNNPKQWQTIDESYEFCFSLYKNDLILLQKKNMQEPEFAYYNDFSISTSSICVEKHDNKFENLTSNQKLLFSNAKEGSVKVESLGIQNLKVFEKYIITPLGDKIKADFQPRENISLKTSKKYGLR

SEQ ID NO: 142 - protein, 1430 aa, Capnocytophaga canimorsus
MKHILGLDLGTNSIGWAVVKEAQNDNEQSEIVDVGVRVNPLTTDEKTNFEKGKPISTNADRTLKRSARRNLQRYKLRRKELIELLKEHQLISTDTILTENGKGTTFQTLELRAKSAKEKISLEELARVFLTINKKRGYKSSRKAKNEDEGQLIDGMEIAKRLYEENLTTGQLSLQLLKEGKKSLPDYYRSDLQFELDKVWNFQKQFHSHILTDEFYAQLKGKGQRATSALFLAKYQIYTAENKGSREDKKLQAYQWRVDALSKELTREQLAFVITEINNNLNNSSGYLGAISDRSKELYFNNETVGEYLWKQIAANPHTSLKNQVFYRQDYLDEFEQIWKTQSAFYPEILTDELKKELRDVVIFYQRKLKSQKSLVSFCEFENKEIEIKKEDGTSTKKVIGLKVAPKSSPLFQEFKIWQNLNNVLIRKKGSKTKKVDKNQQAVLFEEEKTIFELDLEAKQALFNELNLKGNLKAYYCLEILGYSPKEWEMNYSVLEGNRTNKALYEAYLKITDLEGYDAKNHLKVKLNKDEVELDDLKVPASEIKDMVQAIFKEAGINTDILHFNAELDGKDFENQASYQLWHLLYSYEGDDSKSGNELLYKLLETKFGFKKEYAQILANVSLSDDYGSLSTKAMRKIHPYIKENKFSTACELAGYRHSKHSLTKEENDNRVLKDSLEVLKKNSLRQPVVEKILNQMINLVNALLKKYRTENPNFKFDEIRIELARELKKNAEERANMTVNINKAKTEHEKIIKILKNEFGLPNPTRNDIIRYRLYEELKANGYKDLYTNEYIEKQDLFTKNIDIEHIIPKSRVFDDSFSNKTLSFRKTNLDKGERTAFDYIESKFGADKLEEYVARVEDLYKNNIISKAKYQKLLKKESEIGDGFVERDLRETQYIAKKAKEILLQITPNVLSTSGGITDRLREDWDLINVMKELNLPKYRALGLTQMEDRKYGQQVEVIIDWTKRNDHRHHAMDALTVAFTKHNHIQYLNYLNARKNEKHREHSNIMGIQQLETIKVTDKNGNEKRVFKAPMPNFRQVTKAFLENVLISHKAKNKVVTKNKNKVAGSNKVQEVLTPRGQLHKETVYGKYQYYVQKEEKIGGKFDLETIKKVANPLYQSLLKKRLEENGGDPKKAFTGKNSLAKNPIYLDDAQTEQLPEKVKLVWLENSFSIRKDITPENFKDEKLIDKILDEGVKRILKERLQSFGNDAKKAFSDLDKNPIWLNKEKGIAIKRVAISGVANAEPLHTKKDHLGKEILDKEGKSIPVDFISTGNNHHVAVYRDEKGNLQEKVVSVFEAVVRANQGLPIIDKTYNQHLGWEFLFTMKQNEMFVFSNESTGFNPNDIDLLDPKNKKIISPNLFRVQKFSKLQYGNSFVREFVFRHHLETTVEDRKELQGITYKQMKNSAFFNDIIKVRINHLGGIVSVGEY

SEQ ID NO: 143 - protein, 1436 aa, Capnocytophaga gingivalis ATCC 33624
MKYIKYILGLDIGSNSIGWALIQLDLLQKTKRIIAAGSRIIPMDQKVLSDFGKGITISPTAQRTSYRNARHCRERHLLRRERLHRVLHILGFLPTHYDKQIDFSKRYGKFVDNTEPKIAYNEGKFLFMDSFQEMLSDFKSHQPDLFYTKKNGEESKIPYDWTIYYLRKKALSQKISKEELAWIILNFNQKRGYYQLREEEGNKENDFEIISSKIISVIKKDKDKKYNKYWYDIILENGLVYQAAFYNDFVYNWINQDREFIIERTSLKNGAEKVKLSYLPTFDEIDKMDKKEQDKYYKKIKIKTENSIGNKTVGCYIYDHILQNPNEKIKGKLVRTIERKYYKEELKAILEKQIALQPELFTDQLLADCIRELYSKNEAQQRNLAARDFVHLLVEDIIFYQRPLRRQKSTLANCSLESRSYIDKDSHTRKEAPLKVCPKSNPYYQEFRVLQWLQNLKIYEIDSDQEVTHQFIKTLEDKQQLFEFLMAQKEIDCEELLKYFLNQTYPNAKEKALKSELKKWKDTYRWNYVYDIGEKSSKKYPMNETRYELKRHLEKVANLPDDFLSSEVEYLLWHLIYSVKDKVAYEKGLKKFAQKHHLDKDSFVESFKKFNPYPSEYGSFSEKAIRKLLPLMRFGAHWDFNHIDKNTQKRIEDLITGVENEEIRTILREKAEKYQLEKETDFQDLPLWLAQYIVYNRHAEASSLEKWTSVNDLETYLNEFKQHSLRNPIVEQVVMETLRVVRDIWQQYGQGQASFFNEIHIELGRELKKTAKEREKLSKQNQKNEDINLSIKEKLKELEKYNTRAYSITHQEKYKLWLEQKHISPYTGQIISPENLFTDNYEIEHIIPQSRFFDDSLSNKVVCESIVNKAPYKDRQLGLEFIKNQGGRIVKELSKENKTIKIFTEEQYRTFIKEHYSNNPEKTKKLLLEEIPEKMVARQMNDTCYISKFISEILSKIVRSDEQDEGVHSKNVILCTGKITSILRQDWGLNDIWDNLILPRFERMNNLLQKEKFTIYSIEKQKKIPVVPINDQFKSFQKKRIDHRHHAMDAIIIACTTREHINYINNQHALEKEKDKKEKQEERDKLREKLCIKKYNNRSEGNYSWIFKKPWDTFTQEVRVALEDIVVSFKQNLRVINKATNYYERWVEENGKYIKKMVKQEGTNWAIRKPLHEETISGKIYLDREKITKNDILTATRKTVDSSFDDKRIKKITDTGIQKILLNYLKYKGSPEIAFSPEGLEELNKNLSIYNDGKPHKPIYKVRIYEKGSGRFALGEKGRKYKKYVQGASNLYFGIYQGAKRSFATIPLNEVIERQKQGLPSVPEYNEKGDLLLFSLSPNDLVYVPIEGEIIENIDFRNLSKEQKERIYNVNDFSSTCYFTPNRIAKAIFPKEVDLQRKGDKLSGSYDTKTASLEGIQIKEVCIKLKVDRLGNISKA

SEQ ID NO: 144 - protein, 1426 aa, Capnocytophaga ochracea
MKNILGLDLGTTSIGFAHIVEDENKEKSEIKELGVRIVSLTTDEQSDFEKGKSITTNANRTLKHGARLNLDRYQQRRKYLIDLLQKANLITPSSILAENGKNTTHSTWQLRAKAVTERIEKEEFARILLAINKKRGYKSSRKAKTEDEGQAIDGMAIAKRLYDENLTPGQLSLQLLQQNKKLLPDFYRSDLQKEFDLVWNFQKQFYPDILTDIFYKELQGKGKDATSKAFSKRYHFDTTENKGSKESVRLQAYQWRAEAISKQLSKEEVAYVLTEINNNLNNASGYLGAISDRSKELYFNRQTVGQYLYAKLQENRHNSLKNKVFYRQDYLDEFERIWETQASFHKELTDELKKQIRDVVIFYQRKPKSQKGLISFCEFESKEIEIEKDGKTITKNIGARVVPKSSPLFQEFKIWQILNNVICKRKGIRKKKISAKTTQLDLLNESSQTIFSLDMECKQLLFDELNLKGDLKSDKVLKLLGYSPQEWEINYNQLEGNRTQKALYEAYLKIVEMEAHDVKDILQIKSAKDDWSLDESPLSASEIREKVKAIFQTLGICTKILYFDPLLPVKEFEEQDSYQLWHLLYSYESDDSTSGNETLYRILEKKYAFKREHARILANVALQDDYGSLSTKAIRKIYPNIKENQYSTACEKAGYKHSKLSLTTEELEARELKNIIPLLKKNALRNPVVEKILNQMINVVNALIEKNSERDAEGKITKYFHFDEIRIELARELKKNAQKRYEMTQNINKAKLEHQKISEILQKEFGIKNPTKSDIIRYRLYQELEHNGYKELYTNAPIARDMLFSKNIEIEHIVPKARVFDDSFSNKTLTFHRINSDKGEYTAFDYITSLNSEEELNQYLTRVENAYKTKSISPTKYKNLLKKASEIGDDFINRDLRDTQYIAKKAKEILFQVTKNVLSTSGSITDRLREDWGLVDVMKELNMPKYQSLGLTEVEERKDGNKVTVIKNWTKRNDHRHHAMDALTVAFTKPSYIQYLNHLNARKDENNKNYSVILAIEEKETIKVPTNNGKNKRVFIEPIPNFRQVAKKHLEEIFISHKAKNKVVTKNTNKPAGTDKQQITLTPRGQLHKETIYGKYQYYINKEEKIGVKFDERTIAKVSNPVYREALLKRLQANDNDPKKAFAGKNALSKNPIYLDESKTKTLPEKVNLTYLEEDFSIRKDISPDNFKDLKSIEKVIDQGVKRILIKRLQAYDNDPKKAFVDLEKNPIWLNKEKGIAIKRVTISGVNNAQPLHIGKDHLGKTTLNKEGKEIPVDYVSTGNNHHVAIYRDKEGNLQEQIVSFFDAVVRAQQGIPIIDKTYKQAEGWQFLFTMKQNEMFVFPNATTGFNPAEIDLLDPKNKKLISPNLFRVQKIATKDYFFRHHLETNVETDNILKNVTWKREGLSGLKDIVKVRINHLGDIVSIGEY

SEQ ID NO: 145 - protein, 1437 aa, Capnocytophaga sp. CM59
MKYIKYILGLDIGSNSIGWALIQLDLLQKTKRIIATGSRIIPMDQKVLSDFGKGITISPTAQRTSYRNARHCRERHLLRRERLHRVLHILGFLPTHYDKQIDFSKRYGKFVDNTEPKIAYNERKFLFMDSFQEMLADFKIHQPDLFYTKKNGEESKIPYDWTIYYLRKKALSRKISKEELAWIILNFNQKRGYYQLREEEEENKENDFEIISSKIISVIKKDKDKKYNKYWYDIILENGLVYQAAFYNDFVYNWINQDREFIIERISLKNGTEKVKLSYLPTFDEIDKMDKKEQDKYYKKIKIKTENSIGNKTVGCYIYDHILQNPNEKIKGKLVRTIERKYYKEELKAILEKQVALQPELFTDQLFADCIRELYSKNEAQQRNLAARDFVHLFVEDIIFYQRSLRRQKSTLANCSLESRSYIDKDSHTRKEAPLKVCPKSNPYYQEFRVLQWLQNLKIYEIDTDQEVTHEFIKTLEDKQQFFDFLMNQKEIDCEELLKYFLNQTYPNAREKALKSELKKWKDTYRWNYVYDIGEKSSKKYPMNETRYELKRHLEKVANLPDDFLSSEVEYLLWHLIYSVKDKVAYEKGLKTFAQKHHLDKDSFVESFKKFKPYPSEYGSFSEKAIRKLLPLMRFGSYWDFNHIDKNTQKRIEDLITGVENEEIRTILREKAEKYQLEKETDFQDLPLWLAQYIVYNRHAEASSLEKWTSVNDLETYLNEFKQYSLRNPIVEQVVMETLRVVRDIWQQYGQGQASFFDEIHIELGRELKKTAKEREKLSKQNQKNEDINLSIKEKLKELEKYNTRAYSITHQEKYKLWLEQKHISPYTGQIISPENLFTDNYEIEHIIPQSRFFDDSLSNKVVCESIVNKAPYKDRQLGLEFIKNQGGRIVKELSTENKTIKIFTEEQYRTFIKEHYSNNPEKTKKLLLEEIPEKMVARQMNDTCYISKFISEILSKIVRSDEQDEGVHSKNVILCTGKITSALKQDWGVNDVWNDLILPRFERMNDLTQSTLFTTYNEKYQKYLPTVPMEYSNGFQKKRIDHRHHAMDAIIIACATREHINYINNQHALEKGKDKKEKQKEHDKLREKLCIKKDNKGSEENYSWIFKKPWDTFTQEVQAALEGIVVSFKQNLRVINKATNYYERWVEENGKYIKKMVKQEGTNWAIRKPLHEETISGKIYLDREEITKNDILTATRKTVDSSFDEKRIKKITDTGIQKILLNYLKYKGSPEIAFSPEGLEELNKNLSIYNDGKPHKPIYKVRIYEKGSGRFALGEKGRKYKKYVQGAPNLYFGIYQGANKRSFATIPLNEVIERQKQGRPSIPEYNEKGDPLLFSLSPNDLVYVPVEGEIIEDIDFQNLSKEQKERIYNVNDFSSTCYFTPNRIAKAIFPKEVDLQRKGDKLPGSYDTKTASLEGIQIKEVCIKLKIDRLGNISKA

SEQ ID NO: 146 - protein, 1471 aa, Capnocytophaga sp. oral taxon 324 str. F0483
MCKYFYIKNFITFVLSKSIIPMKHILGLDLGSNSIGWAFVQQDFENKQGKIIATGSRIIPMDQGILGDFERGNTVSQTAERTTYRSTRRLRERHLLRRERLHRVLHILGFLPPHYDAQIDFTKRYGKFIDNAEPKIAYNNGNFIFMNSFNEMIEDFKKHQPQLFYKKSNGEESKIPYDWTIYYLRKKALSQKITQQELAWLILHFNQKRGYYQLRGEEETENPNKEVAFHSLKVVDVEAEAPNKKGEIWYTIRLENGWIYRRTSKIPLDDWKGKTRDFIVTTDLNDDGTIKVDKEGKEKRSFRAPDENDWNLLKKKTEHDIDFSGKTVGAYIYDHLLQNPNQKIKGKLVRTIERKYYKDELKAILAKQIALQPELFTETLLADCIRELYRKNETQQQNLLSKDFLHLFVEDIIFYQRPLRSKKSTIANCTLEKRSYIDKETNERKDAPIKVCAKSNPYYQEFRVLQWLQNLRIYEIETDREVTAEFIETPQDCEALFNFLMSQKEIDNKGLLKYFLFAKNPQIKDKAAKSELKKWLTTYRWNYVYDAADNSSKKYPMNETGYELQRYLQKVEGLPANFLTFDITYQLWHLLYSVKDKVEFEKALKKFAKKKQLDKTSFVDSFKNFKPYPNEYGSFSEKAIKKLLPLMRFGNHWDFNRIDVSTQKRIDDLINGVANEDIRTIIREKAEKYQLNSETCFQDLPLWLAQYVVYNRHAEATDIEKWTSVSDLEAYLEDFKQHSLRNPIVEQVVTETLRVVRDIWQQYGGGQANFFDEIHIELGRELKKTAEERKQLSDKNQENESTNLRIKKLLAELKEDASIQNVRPYSLVQQELLKIYEEGVFSATDEVEEDIQKIRKKAEPSKADLQRYKLWLEQKYKSPYTGEVISLTKLFTEEYEIEHIIPQSRYYDDSLSNKVICESAVNKLKTNQLGLEFIQNHHGEKVRITANKEVTIFTEEQYKEFVKKHYANNSAKQQKLLLNEIPEKMVARQLNDTRYISKYISEILSKIVRSDEKDEGVNSKNIIPCTGKITTALKQDWGLNDVWNKLILPRFERMNQLTQTQLFTSYNDRLQKNLPTVPIEYSQGFQKKRIDHRHHAMDALVIACATREHINYMNNQHALDKSKDKKEKQQSRIDLRTILCEKKNNNWQFKKPWSTFTQEAKEALEHIVVSFKQNLRVINKATNYYEKWEEKNGVLVKKKVKQEGTNWAIRKPLHKETVSGKIVLDRKIGKDKILTATRKAVDITFTEKIISSITDTGIQKILLNYLKYKGSPEVAFSTEGLEELNKNIAQYNNGKKHQPIYKVRIFEEGSKFPLGETGAKATKYVEAAKGTNLFFGVYQGKGKRTYATIPLNEVIERQKQGLPSVPERNEKGEPLLFSLSPNDLVYVPMEGEIAETIDFNNLSKEQKERIYKTVSFTGNQCFFVQEAVATPIVNKMEYSPLNKMERDILGTMIKEVCIKLKVDRLGNITKA

SEQ ID NO: 147 - protein, 1450 aa, Capnocytophaga sp. oral taxon 326 str. F0382
MKRILGLDLGSNSIGWAFVEQDFENKQGKIIATGSRIIPMDQGILGDFEKGNTVSQTAERTTYRSMRRLRERHLLRRERLHRVLHILGFLPPHYDAQIDFTKRYGKFIDNAEPKIAYNNGNFIFMNSFNEMIEDFKKYQPQLFYKKSNGEESKIPYDWTIYYLRKKVLSQKITQQELAWLILHFNQKRGYYQLRGEEETENPNKEVAFHSLKVVDVEAEAPNKKGEIWYTIRLENGWIYRRTSKIPLDDWKGKTRDFIVTTDLNDDGTIKVDKEGKEKRSFRAPDENDWNLLKKKTEHDIDFSGKTVGAYIYDHLLQNPNQKIKGKLVRTIERKYYKDELKAILAKQIALQPELFTETLLADCIRELYRKNETQQQNLLSKDFLHLFVEDIIFYQRPLRSKKSTIANCTLEKRSYIDKETNERKDTFIKVCAKSNPYYQEFRVLQWLQNLRIYEIETDREVTAEFIETAEDYEALFNFLMSQKEIDNEGLLKYFLFAKNPQIKDKVAKSELKKWLTTYRWNYVYDAADNSSKKYPMNETGYDLQRYLQKVEGLPANFLTFDITYRLWHLLYSVKDKVEFEKALKKFAQEYQLDEASFVDSFKNFKPYPNEYGSFSEKAIKKLLPLMRFGNHWDFNRIDVSTQKRIDDLINGVANDEIRTIIREKAEKYQLNSESCFQGLPLWLAQYVVYNRHAEATDIEKWTSVSDLETYLEDFKQHSLRNPIVEQVVTETLRVVRDIWQQYGGGQANFFDEIHIELGRELKKTAEERKQLSNRNQENENTNLRIKKLLAELKEDASIQNVRPYSPVQQELLKIYEEGVFSSTDQVEEDIQKIRKKAEPTTPEIQRYKLWLEQKYKSPYTGEVISLTKLFTEEYEIEHIIPQSRYYDDSLSNKVICESAVNKLKTNQLGLEFIQNHHGEKVRITGNKEVTIFTEEQYKEFVKKHYANNSAKQQKLLLNEIPEKMVARQLNDTRYISKYISEILSKIVRSDEKDEGVNSKNVIPCTGKITTALKQDWGLNDVWNELILPRFERMNQLTQTQLFTSYNDRFQKNLPTVPIEYSQGFQKKRIDHRHHAMDALVIACATREHINYMNNQHALDKNKDKKEKQQSRIDLRTILCEKKNNNWQFKKPWSTFTQETKEALEHIVVSFKQNLRVINKATNYYEKWEEKNGVLVKKKVKQEGTNWAIRKPLHKETVSGKIVLDRKIGKDKILTATRKEVDITFTEKIISSITDTGIQKILLNYLNYKGSPEVAFSAEGLEELNKNIAQYNDGKKHQPIYKVRIFEEGSKFPLGETGAKATKFVEAAKGTNLFFGVYQGKEKRSYATIPLNEVIERQKQGLPSVPERNEKGEPLLFSLSPNDLVYVPMEGEIAETIDFNNLSKEQKERIYKTVSFTGNQCFFVQEAVATPIVNKMEYSPLNKMERDILGTMIKEVCIKLKVDRLGNITKA

SEQ ID NO: 148 - protein, 1435 aa, Capnocytophaga sp. oral taxon 329 str. F0087
MKNILGLDLGTTSIGFAHIVEDENKEKSEIKELGVRIVSLATDEQSDFEKGKSISTNANRTLKHGARLNLDRYQQRRKFLIDLLQKANLITSASILAENGKNTTHSTWQLRAKAVTERIEKEEFARVLLAINKKRGYKNSRKTKTEDEGQAIDGMAIAKCLYDENLTPGQLSLQLLQQNKKLLPDFYRSDLQKEFDLVWNLQKQFYPDILTDSFYKELQGKGKDATSKAFSKRYHFDTAENKGSKESVRLQAYQWRAEAISKQLSKEEVAYVLTEINNNLNNSSGYLGAISDRSKELYFNRQTVGQYLYAQLQENRHNSLKNKVFYRQDYLDEFERIWETQASFHKELTDELKKQIRDVVIFYQRKLKSQKGLVSFCEFESKEIEIEKDGKAITKSIGARVVPKSSPLFQEFKIWQILNNVTCKRKGIRKKKSSAKSTELDLFNEPSQSIFSLDMECKQLLFDELNLKGDLKSDKVLKLLGYSPQEWEINYNQLEGNRTQKSLYEAYLKIIEIEGYEVKDILQIKSTKDDWSLDESPLSASEIRERVKVIFQTLGICTKILYFDPLLPVKEFEQQYSYQLWHLLYSYESDDSTSGNETLYRILEKKYAFKREHATILANVALQDDYGSLSTKAIRKIYPYIKENQYSTACELAGYKHSKLSLTTEELEARELKNIIPLLKKNALRNPVVEKILNQMINVVNALIEKNSERDAEGKITKYFHFDEIRIELARELKKNAQERYEMTQNINKAKLEHQKISEKLQKQFGIKNPTKSDIIRYRLYQELEHNGYKELYTNTYIAPDVLFSKNIDIEHIVPKARVFDDSFSNKTLAFKEFNIKKGESTAFDYITSLNCEGELNQYLTRVENAYKTKSISLTKYKNLLKKASEIGDGFINRDLRDTQYIAKKAKEILFQVTKNVLSTSGSITDRLREDWGLVDVMKELNMPKYQSLGLTEVEERKDGNKVTVIKDWTKRNDHRHHAMDALTVAFTKPSYIQYLNHLNARKDENNKNYSVILAIEKKETIKVPINNGKNKRVFIEPILNFRQVAKKHLEEIFISHKAKNKVVTKNINKPAGTDKQQITLTPRGQLHKETIYGKYQYYVNKEEKVGVKFDERTITKVSNPLYREALLKRLQANDNDPKKAFAGKNALSKNPIYLDEAKTKTLPEKVNLTYLEEDFSIRKDISPDNFKDLKSIEKVIDQGVKRILIKRLQAYDNDPKKAFVDLEKNPIWLNKEKGIAIKRVTISGVSNAQPLHIGKDHLGKTTLNKEGKEVPVDYVSTGNNHHVAIYRDKEGNLQEQIVSFFEAVVRAQQGLPIIDKNYKQAEGWQFMFTMKQNEMFVFPNEATGFNPAEIDLLDPKNKKLISPNLFRVQTISIVKYGNSVVRDFKFRHHLETTLQDDKILQGITFQQIKSLEPLRNIVKVRINHLGDIVNIGEY

SEQ ID NO: 149 - protein, 1426 aa, Capnocytophaga sp. oral taxon 335 str. F0486
MKNILGLDLGTTSIGFTHIVEDENKEKSEIKELGVRIVSLTTDEQSDFEKGKSISTNANRTLKHGARLNLDRYQQRRKFLIDLLQKANLITSSSILAENGKNTTHSTWQLRAKAVTERIEKEEFARVLLAINKKRGYKSSRKAKTEDEGQAIDGMAIAKRLYDENLTPGQLSLQLLQQNKKLLPDFYRSDLQKEFDLVWNFQKQFYPDILTDSFYKELQGKGKDATSKAFSKRYHFDTAENKGSRESVRLQAYQWRAEAISKQLSKEEVAYVLTEINNNLNNASGYLGAISDRSKELYFNRQTVGQYLYAQLQENKHNSLKNKVFYRQDYLDEFERIWETQASFHKELTEELKKQIRDVVIFYQRKLKSQKGLISFCEFESKEIEIEKDGKTITKSIGARVVPKSSPLFQEFKIWQILNNVTCKRKGIRKKKSSAKSTELDLFNEPSQTIFSLDMECKQLLFEELNLKGDLKSDKVLKLLGYSPQEWEINYNQLEGNRTQKALYEAYLKIVEMEAHDVKDILQIKSTKDDWALEESPLSASEIRERVKAIFQTLGICTKILYFDPLLPVKEFEEQDSYQLWHLLYSYESDDSTSGNETLYRILEKKYAFKREHATILANVTLQDDYGSLSTKAIRKIYPYIKENQYSTACEKAGYKHSKLSLTTEELEARELKNIIPLLKKNALRNPVVEKILNQMINVVNALIEKNSERDAEGKITKYFHFDEIRIELARELKKNAQERYEMTQNINKAKLEHQKISGILQKEFGIKNPTKSDITRYRLYQELAHNGYNDLYTNTYIPKELLFSKNIDIEHIVSKARVFDDSFSNKTLAFREFNIKKGESTAFDYITSLNNEEELNQYLNRVENAYKTKNISPAKYKNLLKKASEIGDGFINRDLRDTQYIAKKAKEILFQVTKNVLSTSGSITDRLREDWGLVDVMKELNMPKYQSLGLTEVEERKEGNKVTVIKNWTKRNDHRHHAMDALTVAFTKPSYIQYLNHLNARKDKNNKNYSVILAIEEKETIKVPTNNGKNKRVFIEPIPNFRQVAKKHLEEIFISHKAKNKVVTKNTNKPAGTDKQQITLTPRGQLHKETVYGKYQYYVNKEEKIGVKFDKETIAKVSNPVYREALLKRLQANDNDPKKAFAGKNALSKNPIYLDEAKTKTLTEKVNLTYLEEDFSIRKDISPDNFKDLKSIEKVIDQGVKRILIKRLQDYDNDPKKAFVDLEKNPIWLNKEKGIAIKRVTISGVNNAQPLHIGKDHLGKTTLNKEGKEIPVDYVSTGNNHHVAIYRDKEGNLQEQIVSFFEAVVGAQQGLPIVDKTYKQAEGWQFLFTMKQNEMFVFPNEATGFNPAEIDLLDPKNKKQISPNLFRVQKIATKDYFFRHHLETNVDTDNVLKNTTWKREGLSGLKDIVKVRINHLGDIVSIGEY

SEQ ID NO: 150 - protein, 1432 aa, Capnocytophaga sp. oral taxon 380 str. F0488
MKNILGLDLGTTSIGFAHIVEDENKEKSEIKELGVRIVSLTTDEQSDFEKGKSITTNANRTLKHGARLNLDRYQQRRKYLIDLLHKANLITPSSILAENGKNTTHSTWQLRAKAVTERIEKEEFARILLAINKKRGYKSSRKAKTEDEGQAIDGMAIAKRLYDENLTPGQLSLQLLQQNKKLLPDFYRSDLQKEFDLVWNFQKQFYPDILTDIFYKELQGKGKDATSKAFSKRYHFDTAENKGSKESVRLQAYQWRAEAVSKQLSKEEVAYVLTEINNNLNNASGYLGAISDRSKELYFNRQTVGQYLYAQLQENRHNSLKNKVFYRQDYLDEFERIWETQALFHKELTDELKKQIRDVVIFYQRKPKSQKGLISFCEFESKEIEIEKDGKTITKNIGARVVPKSSPLFQEFKIWQILNNVICKRKGIRKKKISAKTTQLDLLNESSQTIFSLDMECKQLLFDELNLKGDLKSDKVLKLLGYSPQEWEINYNQLEGNRTQKALYEAYLKIVEMEAHDVKDILQIKSTKDDWSLDESPLSASEIRESVKAIFQALGICTKILYFDPLLPVKDFEEQDSYQLWHLLYSYESDDSTSGNETLYRILEKKYAFKREHARILANVALQDDYGSLSTKAIRKIYPNIKENQYSTACEMAGYKHSKLSLTTEELEARELKNIIPLLKKNALRNPVVEKILNQMINVVNALIEKNSERDAEGKITKYFHFDEIRIELARELKKNAQKRYEMTQNINKAKSEHQKISEILQKEFGIKNPTKSDIIRYRLYKELEHNGYKELYTNTYIAPDVLFSKNIDIEHIVPKARVFDDSFSNKTLAFKDFNIKKGESTAFDYITSLKNEEKLNQYLARVENAYKTKNISPAKYKNLLKKASEIGDGFINRDLRDTQYIAKKAKEILFQVTKNVLSTSGSITDRLREDWSLVDVMKELNMPKYQSLGLTEVEERKDGNKVTVIKDWTKRNDHRHHAMDALTVAFTKPSYIQYLNHLNARKDENNKNYSVILAIEKKETIKVPTNNGKNKRVFIEPIPNFRQVAKKHLEEIFISHKAKNKVVTKNTNKPAGTNKQQITLTPRGQLHKETIYGKYQYYVNKEEKVGVKFDKETIAKVSNPLYREALLKRLQANDNDPKKAFTGKNALSKNPIYLDEAKTKTLPEKVNLTYLEEDFSVRKKIVPKNPTSKEFVPNLKSIEKVVDEGVRNILIERLRVYNNDPEKAFVDLEKNPIWLNKEKGIAIKRVTISGVNNAQPLHIGKDHLGKTTLNKEGKEIPVDYVSTGNNHHVAIYRDKEGNLQEQIVSFFEAVVRTQQGLPIIDKTYKQEEGWQFLFTMKQNEMFVFPNEATGFNPAEIDLLDPKNKKQISPNLFRVQKIATKDYFFRHHLETNVETDNVLKNTTWKREGLSGLKDIVKVRINHLGDIVSIGEY

SEQ ID NO: 151 - protein, 1450 aa, Capnocytophaga sp. oral taxon 412 str. F0487
MKHILGLDLGSNSIGWAFVQQDFENKQGKIIATGSRIIPMDQGILGDFERGNTVSQTAERTTYRNTRRLRERHLLRRERLHRVLHILGFLPPHYDSQIDFTKRYGKFIDNAEPKIAYNNGNFIFMNSFNEMIEDFKKYQPQLFYKKSNGEESKIPYDWTIYYLRKKALSQKITQQELAWLILHFNQKRGYYQLRGEEETENPNKEVAFHSLEVVDVEAEAPNKKGEIWYTIRLENGWIYRRTSKIPLDDWKGKTRDFIVTTDLNDDGTIKLDKEGKEKRSFRAPDENDWNLLKKKTEHDIDFSGKTVGAYIYDHLLQNPNQKIKGKLVRTIERKYYKDELKAILAKQIALQPELFTETLLADCIRELYRKNETQQQNLLSKDFLHLFVEDIIFYQRPLRSKKSTIANCTLEKRSYIDKETNERKDTPIKVCAKSNPYYQEFRVLQWLQNLRIYEIETDREVTAEFIETAQDNEALFNFLMSQKEIDNESLLKYFLFAKNPQIKDKVAKSELKKWLTTYRWNYVYDAADNSSKKYPMNETGYELQQYLQKVEGLPANFLTFDITYRLWHLLYSVKDKVEFEKALKKFAQEYQLDEASFVDSFKNFKPYPNEYGSFSEKAIKKLLPLMRFGNHWDFNRIDVSTQKRIDDLINGVANDEIRTIIREKAEKYQLNSETCFQGLPLWLAQYVVYNRHAEAADIEKWTSVNDLEAYLEDFKQHSLRNPIVEQVITETLRVVRDIWQRYGGGQANFFDEIHIELGRELKKTAEERKQLSNRNQENENTNLRIKKLLAELKEDASIQNVRPYSPVQQELLKIYEEGVFSATDEVEEDIQKIRKKAEPTTPEIQRYKLWLEQKYKSPYTGEVISLTKLFTEEYEIEHIIPQSRYYDDSLSNKVICESAVNKLKTNQLGLEFIQNHHGEKVRITANKEVTIFTEEQYKEFVKKHYANNSAKQQKLLLNEIPEKMVARQLNDTRYISKYISEILSKIVRSDEKDEGVNSKNIIPCTGKITTALKQDWGLNDVWNELILPRFERMNQLTQTQLFTSYNDRFQKNLPTVPIEYSQGFQKKRIDHRHHAMDALVIACATREHINYMNNQHALDKSKDKKEKQQSRIDLRTILCEKKNNNWQFKKPWSTFTQEAQEALEHIVVSFKQNLRVINKATNYYEKWEEKNGVLVKKKVKQEGTNWAIRKPLHKETVSGKIVLDRKIGKDKILTATRKSVDITFTEKIISSITDTGIQKILLNYLKYKGSPEVAFSAEGLEELNKNIAQYNDGKKHQPIYKVRIFEEGSKFPLGETGAKATKYVEAAKGTNLFFGVYQGKGKRTYATIPLNEVIERQKQGLPSVPERNEKGEPLLFSLSPNDLVYVPMEGEIAETIDFNNLSKEQKERIYKTVSFTGNQCFFVQEAVATPIVNKIEYSPLNKMERDILGTMIKEVCIKLKVDRLGNITKA

SEQ ID NO: 152 - protein, 1426 aa, Capnocytophaga sputigena ATCC 33612
MKNILGLDLGITSISFAHIVEDENKEKSEIKELGVRIVSLTTDEQSDFEKGKSITTNANRTLKHGARLNLDRYQQRRKYLIDLLQKANLITSSSILAENGKNTTHSTWQLRAKAVTERIEKEEFARVLLAINKKRGYKSSRKAKTEDEGQAIDGMAIAKRLYDENLTPGQLSLQLLQQNKKLLPDFYRSDLQREFDLVWNFQKQFYPDILTDSFYKELQGKGKDATSKAFSKRYHFDTAENKGSKESVRLQAYQWRAEAISKQLSKEEVAYVLTEINNNLNNASGYLGAISDRSKELYFNRQTVGQYLYAQLQENRHNSLKNKVFYRQDYLDEFERIWETQASFHKELTDELKKQIRDVVIFYQRKLKSQKGLISFCEFESKEIEIEKDGKTITKTIGARVVPKSSPLFQEFKIWQILNNVTCKRKGIRKKKSSAKSTELDLFNEPSQTIFSLDMECKQLLFDELNLKGDLKSDKVLKLLGYSPQEWEINYNQLEGNRTQKALYEAYLKIVEMEAHDVKDILQIKSAKDDWSLDESPLSASEIKEKVKDIFQALGICTKILYFDPLLPVKEFEKQDSYQLWHLLYSYESDDSTSGNETLYRILEKKYAFKREHARILANVALQDDYGSLSTKAIRKIYPNIKENQYSKACELAGYKHSKLSLTTEELEARELKNIIPLLKKNALRNPVVEKILNQMINVVNALIEKNSERDAEGKITKYFHFDEIRIELARELKKNAQKRYEMTQNINKAKLEHQKISEILQKKFGIKNPTKSDIIRYRLYQELEHNGYKELYTNAPIARDMLFSKNIEIEHIVPKARVFDDSFSNKTLTFHRINSNKGEYTAFDYITSLNSEEELNQYLTRVENAYKTKSISLTKYKNLLKKASEIGDGFINRDLRDTQYIAKKAKEILFQVTKNVLSTSGSITDRLREDWGLVDVMKELNMPKYQSLGLTEVEERKEGNKVTVIKNWTKRNDHRHHAMDALTVAFTKPSYIQYLNHLNARKDENNKNYSVILAIEEKETIKVPTNNGKNKRVFIEPIPNFRQVAKKHLEEIFISHKAKNKVVTKNVNKPAGTDKQQITLTPRGQLHKETIYGKYQYYVNKEEKVGVKFDERTITKVSNPLYREALLKRLQANDNDPKKAFTGKNALSKNPIYLDETKTKTLPEKVNLTYLEEDFSIRKDISPDNFKDLKSIEKVIDQGVKRILIKRLQDYDNDPKKAFVDLEKNPIWLNKEKGIAIKRVTISGVSNAQPLHIGKDHLGKTTLNKEGNEIPVDYVSTGNNHHVAIYRDKEGNLQEQIVSFFEAVVRTQQGLPIIDKTYKQEEGWQFLFTMKQNEMFVFPNATTGFNPAEIDLLDPKNKKLISPNLFRVQKIATKDYFFRHHLETNVETDNVLKNTTWKREGLSGLKDIVKVRINHLGDIVSIGEY

SEQ ID NO: 153 - protein, 1140 aa, Catellicoccus marimammalium M35/04/3
MKNMTKVNVGLDVGISSAGWSVINAETNQILESGVRLFSGSDADENVNRRNQRQGRRLFRRRKLRIQEAKKYLENVFQLKDIEPKDEWNPYEIRVRALNEKVSKEELSIALLNIVKHRGISYELEDVTDEEGTNTQSFQSGLDYNRRLLKTKTVGEIQYDRLQKYGQVRGQIQTEDGLLINIFPTKNYVEEVERILETQKKYHPEIDDVFIEKIISFVTRKREYFVGPGNEKSRTDYGIYRENGETLDNLFEILIGKDKFYPEEYRAAGSSYTAQIFNLLNDLNNLRIPTTEDHHLTKAQKEEIITELKNTSRLSGGMLKLISKVTKAPKEEISGYRKDEKDKPDLHSLAYYRKQKNMLEKEGIQIADFSEELLDELATMMTLNTEPGEIRKQLNKITNQYDILTPEVIEVLVKNHTAFVATSNHKWHRFSLKLMKEFIPELLETSKEQSTILCERGFIQNRASYLDENHHFNYAELRENLYNPVVRKSTCEMLKVFTAIQEKYPNIQNVIVELPRETNEDEQKRKIKKINDNNAKRKKEILKEAQAQSGLSEEALEEKLLKTKGLYLKLMLWYEQEGKCVYSGQEIPLSDLLQNKGGYEVDHIIPISISFDDRLCNKVLVRQQLNSQKSNQTPFEYMTTHTDGHLSFHELKELVGKNKRFSKEKRELLLAEIYSNDIETRKRFINRNLVDTSYTARIVLNALQQYKKENQLSMNVSVVRGAMTNILRKKVKLDKTRETFHHHAIDASLMAVIPNIEFFKERKEWLPKSANEEVVEVEVSEEETMPEKEFKVKMRLPESFIQDVQILQRNSFAKEEVSGPQTRERNLKIKFSHQVDQKMNRKVADDTIYGTRQAQLGKDKKEETYVIGKIKDIYNYDEYVRFKKRYDKNKESFLMYHHDPQTFEKLEEILAQYPEYIEDEKGKKKKVSPFALYREENGPVTKYAKKNNGPVIKQLKYYDSKLNRKIDISHKYSTKNRQVVLQSLKPYRTDVYRNQDTGEYTLVGIDQNDGKFVNGHYGIPKSRYEEIKANNKLSEHDEFVFSLYKNSMVKVIDENGESIVVRYLSRSMPNRKNNAEIKPVEKYQFEDGEVVPVYGKCRKQMQTVFVKKGWTLLKGNTDILGNTYFVEKESENPKKMIDDK

SEQ ID NO: 154 - protein, 1329 aa, Catenibacterium mitsuokai DSM 15897
IVDYCIGLDLGTGSVGWAVVDMNHRLMKRNGKHLWGSRLFSNAETAANRRASRSIRRRYNKRRERIRLLRAILQDMVLEKDPTFFIRLEHTSFLDEEDKAKYLGTDYKDNYNLFIDEDFNDYTYYHKYPTIYHLRKALCESTEKADPRLIYLALHHIVKYRGNFLYEGQKFNMDASNIEDKLSDIFTQFTSFNNIPYEDDEKKNLEILEILKKPLSKKAKVDEVMTLIAPEKDYKSAFKELVTGIAGNKMNVTKMILCEPIKQGDSEIKLKFSDSNYDDQFSEVEKDLGEYVEFVDALHNVYSWVELQTIMGATHTDNASISEAMVSRYNKHHDDLKLLKDCIKNNVPNKYFDMFRNDSEKSKGYYNYINRPSKAPVDEFYKYVKKCIEKVDTPEAKQILNDIELENFLLKQNSRTNGSVPYQMQLDEMIKIIDNQAEYYPILKEKREQLLSILTFRIPYYFGPLNETSEHAWIKRLEGKENQRILPWNYQDIVDVDATAEGFIKRMRSYCTYFPDEEVLPKNSLIVSKYEVYNELNKIRVDDKLLEVDVKNDIYNELFMKNKTVTEKKLKNWLVNNQCCSKDAEIKGFQKENQFSTSLTPWIDFTNIFGKIDQSNFDLIENIIYDLTVFEDKKIMKRRLKKKYALPDDKVKQILKLKYKDWSRLSKKLLDGIVADNRFGSSVTVLDVLEMSRLNLMEIINDKDLGYAQMIEEATSCPEDGKFTYEEVERLAGSPALKRGIWQSLQIVEEITKVMKCRPKYIYIEFERSEEAKERTESKIKKLENVYKDLDEQTKKEYKSVLEELKGFDNTKKISSDSLFLYFTQLGKCMYSGKKLDIDSLDKYQIDHIVPQSLVKDDSFDNRVLVVPSENQRKLDDLVVPFDIRDKMYRFWKLLFDHELISPKKFYSLIKTEYTERDEERFINRQLVETRQITKNVTQIIEDHYSTTKVAAIRANLSHEFRVKNHIYKNRDINDYHHAHDAYIVALIGGFMRDRYPNMHDSKAVYSEYMKMFRKNKNDQKRWKDGFVINSMNYPYEVDGKLIWNPDLINEIKKCFYYKDCYCTTKLDQKSGQLFNLTVLSNDAHADKGVTKAVVPVNKNRSDVHKYGGFSGLQYTIVAIEGQKKKGKKTELVKKISGVPLHLKAASINEKINYIEEKEGLSDVRIIKDNIPVNQMIEMDGGEYLLTSPTEYVNARQLVLNEKQCALIADIYNAIYKQDYDNLDDILMIQLYIELTNKMKVLYPAYRGIAEKFESMNENYVVISKEEKANIIKQMLIVMHRGPQNGNIVYDDFKISDRIGRLKTKNHNLNNIVFISQSPTGIYTKKYKL

SEQ ID NO: 155 - protein, 1419 aa, Chryseobacterium sp. CF314
MMIKNILGLDLGTNSIGWALIKQNFENKYGEILGMGSRIIPMSQDVLGEFGKGNSVSQTAARTGYRGVRRLRERFLLRRERLHRVLNVLNFLPEHYASQIDFEKRFGKFKYETEPKLAYNNDGFFFKNSFDEMLGDFKDHQFHLLENGRKVPYDWTIYYLRKKALSQKIEKEELAWILLNFNQKRGYYQLRGEDFEEEKDRVFVRLKVDRVVDSGENIKGKILYDVYFENGWKYEKQIVKTEDWIGRTKEFIVTESILKNGDTKRTFKAVDSEKDWIAIKTKTEQEIDKSHKTVGAYIYEALLQNPKQKIKGKLVRTIERKFYREELKKILERQKEFHPELQSDDLYNDCIRELYRNNEAHQITLSKKDFVHLLLNDLIFYQRPLRSQKSSVSNCTLEFRKYKDENGVEHAQYLKTIPKSNPYYQEFRVWQWMFNLNIYRKDDDTNVTKEFLSSTEDYETLFEFLNNRKEVDQKALLRHFKLNEKTHRWNYVEDKKYPCNETKTMISTRLEKVENYPSDFLTREMEQNIWHIIYSVNDKIEYEKALKSFAHKNNLDENSFFEAFKKFPPFKSEYGSFSEKAIKKLLPLLRLGKYWNWESIDRKSQGRIEKIITGEFDGNIKDKVREKAIHLTAENDFQGLQLWLAQYIVYGRHSEASMIGKWNSADDLEEFLKGFKQHSLRNPIVEQVITETLRVVKDIWLKYGNGAKDFFSEIHIELGREMKQTKDERVDATKRITENENTNLRIKALLAEMMNDNSVENIRPYSPMQQEILKIYEDGILKSDIEIDDDILKISKTAQPSSSDLKRYKLWLEQRYKSPYTGQIIPLNKLFTSEYEIEHIIPQSRYFDDSFSNKIICESAVNKLKDNYIGLGFIKQFGGMIVECGFGKSVEIFKAEEYEDFVKKHYANNRSKRNKLLLEEIPEKMIDRQLNDTRHISKYISGVLSNIVRQEDGTDEGVNSKNIVPGNGKITTQLKQDWGLNDVWNELILPRFERMNQLTNSTDFTSWNKNHQKFLPTVPIEFSKGFSKKRIDHRHHAMDALVIACATKDHINLLNNQSAKSDTKRYDLKRKLMKFERVVYSHSKTGEKIEKEVPKQFLKPWDNFTVDAKNKMETIIVSFKQNLRVINKATNHYEKWIEKDGIKRKELIKQEGTNWAIRKPMHKETVSGKVDLPGIKIPKGKILTATRKSLDTSFDLKTINSITDTGIQKILKNYLEFKGSSELAFSPEGIEDMNKNIEKFNDGKPHQSINKVRIFELGSKFSVGQTGNKKDKYVEAAKGTNLFFAVYEDKNGKRSYETIPLNEVIERQKQGLDSVSFKNKEDFLLCPNDLVYVPSEDELENIYNIDFKNLTTEKTGNIYKVVSFSGNQIFFIRQDIAISIVNKAEFSTLNKMERAIDGSMIKENCIKLKIDRLGNIAKI

SEQ ID NO: 156 - protein, 1021 aa, [Clostridium] cellulolyticum
MKYTLGLDVGIASVGWAVIDKDNNKIIDLGVRCFDKAEESKTGESLATARRIARGMRRRISRRSQRLRLVKKLFVQYEIIKDSSEFNRIFDTSRDGWKDPWELRYNALSRILKPYELVQVLTHITKRRGFKSNRKEDLSTTKEGVVITSIKNNSEMLRTKNYRTIGEMIFMETPENSNKRNKVDEYIHTIAREDLLNEIKYIFSIQRKLGSPFVTEKLEHDFLNIWEFQRPFASGDSILSKVGKCTLLKEELRAPTSCYTSEYFGLLQSINNLVLVEDNNTLTLNNDQRAKIIEYAHFKNEIKYSEIRKLLDIEPEILFKAHNLTHKNPSGNNESKKFYEMKSYHKLKSTLPTDIWGKLHSNKESLDNLFYCLTVYKNDNEIKDYLQANNLDYLIEYIAKLPTFNKFKHLSLVAMKRIIPFMEKGYKYSDACNMAELDFTGSSKLEKCNKLTVEPIIENVTNPVVIRALTQARKVINAIIQKYGLPYMVNIELAREAGMTRQDRDNLKKEHENNRKAREKISDLIRQNGRVASGLDILKWRLWEDQGGRCAYSGKPIPVCDLLNDSLTQIDHIYPYSRSMDDSYMNKVLVLTDENQNKRSYTPYEVWGSTEKWEDFEARIYSMHLPQSKEKRLLNRNFITKDLDSFISRNLNDTRYISRFLKNYIESYLQFSNDSPKSCVVCVNGQCTAQLRSRWGLNKNREESDLHHALDAAVIACADRKIIKEITNYYNERENHNYKVKYPLPWHSFRQDLMETLAGVFISRAPRRKITGPAHDETIRSPKHFNKGLTSVKIPLTTVTLEKLETMVKNTKGGISDKAVYNVLKNRLIEHNNKPLKAFAEKIYKPLKNGTNGAIIRSIRVETPSYTGVFRNEGKGISDNSLMVRVDVFKKKDKYYLVPIYVAHMIKKELPSKAIVPLKPESQWELIDSTHEFLFSLYQNDYLVIKTKKGITEGYYRSCHRGTGSLSLMPHFANNKNVKIDIGVRTAISIEKYNVDILGNKSIVKGEPRRGMEKYNSFKSN

SEQ ID NO: 157 - protein, 1065 aa, Clostridium perfringens C str. JGS1495
MNKDINYALGLDIGITSVGWAVINLDLNRIEDLGVRIFNAAENPKDGSSLALPRRLARGRRRLLRRKAYRVERVRKLIVKNNILTKEELEGLFKNKEVIDVWEARVKGLDYKLSREEWAKILINFCKRRGFKSNRKNETKDKEAGQILSSISYNIEKMKETNSRTIGEYIYNEVKNSDDSYAPLRNKFGEYKMCVSRDVLREEIHTLFEKQRELGNNFASDEIEDKYFEIFNSQRPFSNFEDLEKLVGFCTFERKKHKRAPKHCISSEEFTLYEGINKLSIIKDGEKRKLSEEERTLVVNEAFNKKEIKYTTLRKLLGLSEDELFSTLTYSIDKDISKTENTKFVSLKGYHEIKRAIEKGVSKKAWQDIENNRNLLNDIAYVLTLGKTDDEIEKQLRLRNVPEELFESLLDMSFSKFNNLSIYALEKILPFMKEGYQYNEACEKAGYNFKAIYEGVRTKKLPVIEIDEIVNPVVNRALAQTRKVINSVIDKYGSPVRINIELARDLAKNFKDRKLIEKEQKENRANLDKIRENLRELMDKEPTAVEVLKYRLWEQQRGECAYTQSQIALERLFSPGYCEIDHIIPFSRSFDDSLSNKILVLGSENQRKGNKIPYEYFGEDSERWNSFEIWVKGSYLNYKKKANLLKKKFTEEEQRDWKARNLQDTKYICRYISNFVNNRLEFKESENKQKVITVNGRATAYLRSRWGLNKVREDGDKHHALDAAVVGVTTQGMVQKISKYSKAHELYTVRKNDEFVDVETGECVDVDEYKEIRKDILPRPWRGFSEELKLRLSDNPLEELKKLPIETYNEEFIKENVKPIFVSRVPFRKISGKLFKETIYSERAFKDGYFVSKKSLVDLKRGDLDNFYNYECDKKLYDAISERMKEFNYNGKKAFESPFRKPTKSGKEGPVVRSVKIKSAAPFKDGIPMNEGLVAKEGMVRIDIYEKEGKYFVVPVYRYQLAKGIVPKRAAIAGKSELKWPIMDQTYNFKFSIFKNDLIEIKYAKKDGYFGYYDGFDRHTASLVIENHDNSDRYRGIGVKTGVVEFNKYEVDVLGNYHKVNLGGN

SEQ ID NO: 158 - protein, 1065 aa, Clostridium perfringens D str. JGS1721
MNKDINYALGLDIGITSVGWAVINLDLNRIEDLGVRIFNAAENLKDGSSLALPRRLARGRRRLLRRKAYRVERVRKLILKNNILTKEELEGLFKNKEVIDVWEARVKGLDYKLSREEWAKILINFCKRRGFKSNRKNEAKDKEAGQILSSISYNIEKMKETNSRTIGEYIYNEVKNSEDSYAPLRNKFGEYKMCVSRDVIREEIHTLFEKQRELGNNFASDEIEDKYFEIFNSQRPFSNFEDLEKLVGFCTFERKKHKRAPKHCISSEEFTLYEGINKLSIIKDGEKRKLSEEERTLVVNEAFNKKEIKYTTLRKLLGLSEEELFSTLTYSIDKDISKTENTKFVSLKGYHEIKRAIEKGVSKKAWQDIENNRNLLNDIAYVLTLGKTDDEIEKQLRLRNVPEELFESLLDMSFNKFNNLSIYALEKILPFMKEGYQYNEACEKAGYNFKAIYEGVRTKKLPVIEIDEIVNPVVNRALAQTRKVINSVIDKYGSPVRINIELARDLAKNFKDRKLIEKEQKENRANLDKIRENLRELMDKEPTVVEVLKYRLWEQQRGECAYTQSQIPLERLFSPGYCEIDHIIPFSRSFDDSLSNKILVLGSENQRKGNRTPYEYFGEDSERWNSFEIWVKGSYLNYKKKANLLKKKFSEEEQRDWKARNLQDTKYICRYISNFVNNRLEFKESENKQKVITVNGRATAYLRSRWGLNKVREDGDKHHALDAAVVGVTTQGMVQKISKYSKAHELYTVRKNDEFVDVETGECVDVDEYKEIRKDILPRPWRGFSEELKLRLSDNPLEELKKSPIETYNEEFIKENVKPIFVSRVPFRKISGKLFKETIYSERAFKDGYFVSKKSLVDLKRGDLDNFYNYECDKKLYDAISERMKEFNYNGKKAFESPFRKPTKSGKEGPVVRSVKIKSAVPFKDGIPMNEGLVAKEGMVRIDIYEKEGKYFVVPVYRYQLAKGIVPKRAAIAKKDELKWPIMDQTYNFKFSIYKNDLIEVKYDKKGVYFGYYDGFDRNSASLTIEKHDNSERYRSIGLKVGVLEINKYEVDVLGNYHKVKLGGN

SEQ ID NO: 159 - protein, 1116 aa, Clostridium spiroforme DSM 1552
MVEFLLKEMKIMGRLVLGLDIGITSVGYGVIDIDKNEFVDYGVRLFKEGTAINNEERRSKRGARRLKRRKTNRIADMKKLLERNGLIDEQYTALNNPYEIRKKGLKNKLSNYELATAILHITKNRGTCLESNADETQDEESTKNILSKNALELKDKYICEIQLARLEESGKIRGINNNFKTEDYLKELSKILENQDLEKETIDKIKEIVARRRRYDQGPGSEKSPTPYGSYRMENGELVHVNLIDMMRGKCSVFPDQLRAPQQSYSAELFNLLNDLNNLKINGEKLSSTEKQKIIDFVNEKGGITVKQLLKLIDVGITEISGFRIDKNEKPLITEFKGYKKVLKVFKNYNQESLLNDKSIVDTIMDINTKIKSIDERSDQLKQVLPSLDTSIINDLASIKGVSGYHSLSLKALNLINNEMLKTEMNQMQVLHQLDIFDKNRVSLKGQRQIYADDNAILSPVAKRAHRETFKVINKLRSIYGEFDSIVIETTRDKNTQDQKKRIKNNQKNYEERNTEVNNFLKEAGYNPENINAKTKMKIRLYIEQDAKSAYTLQDINLKELIEDEKAYEIDHIIPISISLDDSFNNKVLTTHDENQEKGNLTPISAFLKGKFHNGNLNTYKVFIQNNKNLNRKKKEYLLCEDDITRYEVVQNFINRNLVDTSYACRTVMNTLVHYFKDNEINTKVHTIKGQATSTFRKRIGLIKDREEDYFHHAIDALIVASLKKMNLINSYLMKVDFNEMYDEETGEIFNVLPDNSYLDEKYISFVSNLKNIYEESNKYIRGVMIKEKMTYPLIKVSHKIDTKPNRKISDDTIYSTRNVDNQDMLVERIKNIYDPKENAANTLINDIINDNTDKYIMYHKDPQTFDKIKAIVLNHFNEFKTDKNCYIVTKEGLYKLKGTSPLALYYEEFGPITKYAKKNNGPTIHSMKFYSEKLGNHLSITHKYSTVNKKVITKQISPYRTDFYQSPEGKYKFVTVRYKDVAYNAKKDKYIIDHSWYREQKKLKKIADEWIFVCSVHRDELIGIMKADGQKRIFDSSTESDGETLYHDAKTYEILKFTATNNDITGRFEVKPIYCYCKKQLMVSIGTCRKIQKFATDVLGNLYIVKDNVLKLEFK

SEQ ID NO: 160 - protein, 1338 aa, Coprococcus catus GD/7
MKQEYFLGLDMGTGSLGWAVTDSTYQVMRKHGKALWGTRLFESASTAEERRMFRTARRRLDRRNWRIQVLQEIFSEEISKVDPGFFLRMKESKYYPEDKRDAEGNCPELPYALFVDDNYTDKNYHKDYPTIYHLRKMLMETTEIPDIRLVYLVLHHMMKHRGHFLLSGDISQIKEFKSTFEQLIQNIQDEELEWHISLDDAAIQFVEHVLKDRNLTRSTKKSRLIKQLNAKSACEKAILNLLSGGTVKLSDIFNNKELDESERPKVSFADSGYDDYIGIVEAELAEQYYIIASAKAVYDWSVLVEILGNSVSISEAKIKVYQKHQADLKTLKKIVRQYMTKEDYKRVFVDTEEKLNNYSAYIGMTKKNGKKVDLKSKQCTQADFYDFLKKNVIKVIDHKEITQEIESEIEKENFLPKQVTKDNGVIPYQVHDYELKKILDNLGTRMPFIKENAEKIQQLFEFRIPYYVGPLNRVDDGKDGKFTWSVRKSDARIYPWNFTEVIDVEASAEKFIRRMTNKCTYLVGEDVLPKDSLVYSKFMVLNELNNLRLNGEKISVELKQRIYEELFCKYRKVTRKKLERYLVIEGIAKKGVEITGIDGDFKASLTAYHDFKERLTDVQLSQRAKEAIVLNVVLFGDDKKLLKQRLSKMYPNLTTGQLKGICSLSYQGWGRLSKTFLEEITVPAPGTGEVWNIMTALWQTNDNLMQLLSRNYGFTNEVEEFNTLKKETDLSYKTVDELYVSPAVKRQIWQTLKVVKEIQKVMGNAPKRVFVEMAREKQEGKRSDSRKKQLVELYRACKNEERDWITELNAQSDQQLRSDKLFLYYIQKGRCMYSGETIQLDELWDNTKYDIDHIYPQSKTMDDSLNNRVLVKKNYNAIKSDTYPLSLDIQKKMMSFWKMLQQQGFITKEKYVRLVRSDELSADELAGFIERQIVETRQSTKAVATILKEALPDTEIVYVKAGNVSNFRQTYELLKVREMNDLHHAKDAYLNIVVGNAYFVKFTKNAAWFIRNNPGRSYNLKRMFEFDIERSGEIAWKAGNKGSIVTVKKVMQKNNILVTRKAYEVKGGLFDQQIMKKGKGQVPIKGNDERLADIEKYGGYNKAAGTYFMLVKSLDKKGKEIRTIEFVPLYLKNQIEINHESAIQYLAQERGLNSPEILLSKIKIDTLFKVDGFKMWLSGRTGNQLIFKGANQLILSHQEAAILKGVVKYVNRKNENKDAKLSERDGMTEEKLLQLYDTFLDKLSNTVYSIRLSAQIKTLTEKRAKFIGLSNEDQCIVLNEILHMFQCQSGSANLKLIGGPGSAGILVMNNNITACKQISVINQSPTGIYEKEIDLIKL

SEQ ID NO: 161 - protein, 1384 aa, Coriobacterium glomerans
MKLRGIEDDYSIGLDMGTSSVGWAVTDERGTLAHFKRKPTWGSRLFREAQTAAVARMPRGQRRRYVRRRWRLDLLQKLFEQQMEQADPDFFIRLRQSRLLRDDRAEEHADYRWPLFNDCKFTERDYYQRFPTIYHVRSWLMETDEQADIRLIYLALHNIVKHRGNFLREGQSLSAKSARPDEALNHLRETLRVWSSERGFECSIADNGSILAMLTHPDLSPSDRRKKIAPLFDVKSDDAAADKKLGIALAGAVIGLKTEFKNIFGDFPCEDSSIYLSNDEAVDAVRSACPDDCAELFDRLCEVYSAYVLQGLLSYAPGQTISANMVEKYRRYGEDLALLKKLVKIYAPDQYRMFFSGATYPGTGIYDAAQARGYTKYNLGPKKSEYKPSESMQYDDFRKAVEKLFAKTDARADERYRMMMDRFDKQQFLRRLKTSDNGSIYHQLHLEELKAIVENQGRFYPFLKRDADKLVSLVSFRIPYYVGPLSTRNARTDQHGENRFAWSERKPGMQDEPIFPWNWESIIDRSKSAEKFILRMTGMCTYLQQEPVLPKSSLLYEEFCVLNELNGAHWSIDGDDEHRFDAADREGIIEELFRRKRTVSYGDVAGWMERERNQIGAHVCGGQGEKGFESKLGSYIFFCKDVFKVERLEQSDYPMIERIILWNTLFEDRKILSQRLKEEYGSRLSAEQIKTICKKRFTGWGRLSEKFLTGITVQVDEDSVSIMDVLREGCPVSGKRGRAMVMMEILRDEELGFQKKVDDFNRAFFAENAQALGVNELPGSPAVRRSLNQSIRIVDEIASIAGKAPANIFIEVTRDEDPKKKGRRTKRRYNDLKDALEAFKKEDPELWRELCETAPNDMDERLSLYFMQRGKCLYSGRAIDIHQLSNAGIYEVDHIIPRTYVKDDSLENKALVYREENQRKTDMLLIDPEIRRRMSGYWRMLHEAKLIGDKKFRNLLRSRIDDKALKGFIARQLVETGQMVKLVRSLLEARYPETNIISVKASISHDLRTAAELVKCREANDFHHAHDAFLACRVGLFIQKRHPCVYENPIGLSQVVRNYVRQQADIFKRCRTIPGSSGFIVNSFMTSGFDKETGEIFKDDWDAEAEVEGIRRSLNFRQCFISRMPFEDHGVFWDATIYSPRAKKTAALPLKQGLNPSRYGSFSREQFAYFFIYKARNPRKEQTLFEFAQVPVRLSAQIRQDENALERYARELAKDQGLEFIRIERSKILKNQLIEIDGDRLCITGKEEVRNACELAFAQDEMRVIRMLVSEKPVSRECVISLFNRILLHGDQASRRLSKQLKLALLSEAFSEASDNVQRNVVLGLIAIFNGSTNMVNLSDIGGSKFAGNVRIKYKKELASPKVNVHLIDQSVTGMFERRTKIGL

SEQ ID NO: 162 - protein, 1099 aa, Corynebacterium accolens ATCC 49725
MSLSYRVGIDVGTYSLGCTAIEVDDNDQPVNILSSVSLIHDSGLDPDQQKRAVTRLASSGVARRTRRLYRRRRRRMINLEKFLTSQGWETRPFEHYSDPYLPWNARVALVNGYISDDAQRGMYLSIAFRHIANHRGWRNPYWKVSSLYSPDKPSDAFEQIRKELEESTGHKIPETVTVGQLISFAQFGKDRLRGGGKKKDEKKPQEQVNQAVISARLHQIDHAREINEICRVQKIDDALRKQILDLVFAAESPKGAQIGRVGKDPLQPKLPRALKASDAFQQYRIVALAGNLRIYRDGVSTPLDRDEKLIVFNYLINLSHKEEPSWLKVAEVLNIDRGQLHGTATMTDDGERAGAAPPVHDTNRTILGCKIKPLVHWWEGANDDERAAMLKALSNSEVEDFDSPAGAQTQAFFANLDESEQEKLDSLHLPIGRAAYSEDTLMRLTSRMLDENLDLYEARLAEFDIPKDWAPPAPRIGEPVGNPAVDRVLKGVARWLEAAADEWGAPKSVVIEHVRDGFISKSKANEIDRANNARHKRNRELFKQMQENLGIDGKLRSSDLWRYQSVQRQNCQCAYCGSPITYTTCEMDHIVPRAGEGSTNTRDNLVATCHRCNLAKKNIPFAVWAAQTNIPGVSVKEALDRTRHWSEDSGMTSKDFKKFRKNVCDRLKRTVVDEPLDARSMESVAWMANELRGRVAQRFQEENTVVNVYRGELTAEARRAAGISDKLRFIDGTGKSRLDRRHHAVDAAVVAFTQNYVAETLAIRSNKKREAQLLQAAEQWKEFTGSDAEHRAAWNAWLPKMQKLAVLLQKALDEDRIAVTSNLRLRLGNGRAHEDSIGELKTIRVGDAISVTDIDRASSEALWCALTREPDFDENNGLPENPDRRIRIHGTWYDAEDDIEVFPVGAGAIKVRGGYAELSRFHHARIYKIPGKKAPVYCMLRVYNADLIRHRHEDLFSVEIKPQTMSVRQAEPKLRKALAENTAEYLGWLVTDDELVIDTSNFNTGQIAEMQSELGQVRRWRLDGFYSPSTLRLRPLQMSAEGLREDTSIGAKKIIDRPGWLPAINKLFGEGHVTVVRRDALGRARLTSNAHLPISWKAE

SEQ ID NO: 163 - protein, 1099 aa, Corynebacterium accolens ATCC 49726
MSLLYRVGIDVGTYSLGCTAIEVDDNDQPVSILSSVSLIHDSGLDPDQQKRAVTRLASSGVARRTRRLYRRRRRRMVKLENFLTAQGWETLPFERYSDPYLPWHARVALVNGYISDDTQRGQYLSIAFRHIANHRGWRNPYWKVSSLYSPDKPSDAFEQIRKELEASTGRQIPETATVGQLISFAQFGKDRLRGGGKQKDKKKPQEQVNQAVISARLHQIDHAREINEICRVQKIDDTLRKQILDLVFAAESPKGAQKGRVGKDPLQPKLFRALKASDAFQQYRIAALTGNLRIYRNGVTVPLDRDEKLIVFNYLVNLPKKEEPSWLKIAEILNIDRGQLRGTATMTDDGERAGATPPVHDTNRTILDSKVKPLAHWWENASDDERAAMLKSLSNSEVEDFDSPAGAQVQAFFADLDETEQEKLDSLHLPMGRAAYSEDTLMRLTNRMLDENLDLYEARLAEFGIPKDWAPPAPRIGEPVGNPAVDRVLKGVARWLEAAADEWGAPKSVVIEHVRDGFVSKSKAIEIDRANNNRHKRNRELFQKMQENLGIEGKVRSSDLWRYQSVQRQNCQCAYCGSPITYTTCEMDHIVPRAGEGSTNTRDNLVATCHRCNLAKKNIPFAVWAEKSTIPGVSVKEALDRTRHWSEDSGMSKKDFQKFRKNVCERLNRTVVDEPLDARSMESVAWMANELRGRVAQRFQEENTTVNVYRGALTAEARRAAGITDKLRFIDGTGKSRLDRRHHAVDAAVVAFIHNYVAETLAIRSNKKREAQLLQGTSQWKEFTGSDDKHRAVWNAWIPKMQKLAVLLQIALDEDRIVVTSNLRLRLGNGRAHEDTISELKTIRVGDAISVTDIDRASSEALWCALTREPDFDEKDGLPENPNRRIRVHGTWYDAEDEIEVFPVGAGAIKVRGGYAKLSRFHHARVYKIPGKKAPIYCMLRVYNTDLVQHRHEDLFSVELKPQTMSVRQAEPKLRKALAENTAEYLGWLVTDDELIIDTSTFRTGLIEEMQSEFGLVRRWRLDGFDSPSLLTLRPLHMSAEGLPDDCALGSRKIIDTKGWRVSINKVFNAGNTTVVRRDALGRARLTSNAHLPISWKEE

SEQ ID NO: 164 - protein, 1084 aa, Corynebacterium diphtheriae
MKYHVGIDVGTFSVGLAAIEVDDAGMPIKTLSLVSHIHDSGLDPDKIKSAVTRLASSGIARRTRRLYRRKRRRLQQLDKFIQRQGWPVIELEDYSDPLYPWKVRAELAASYIADEKERGEKLSVALRHIARHRGWRNPYAKVSSLYLPDEPSDAFKAIREEIKRASGQPVPETATVGQMVTLCELGTLKLRGEGGVLSARLQQSDHAREIQEICRMQEIGQELYRKIIDVVFAAESPKGSASSRVGKDPLQPGKNRALKASDAFQRYRIAALIGNLRVRVDGEKRILSVEEKNLVFDHLVNLAPKKEPEWVTIAEILGIDRGQLIGTATMTDDGERAGARPPTHDTNRSIVNSRIAPLVDWWKTASALEQHAMVKALSNAEVDDFDSPEGAKVQAFFADLDDDVHAKLDSLHLPVGRAAYSEDTLVRLTRRMLADGVDLYTARLQEFGIEPSWTPPAPRIGEPVGNPAVDRVLKTVSRWLKSATKTWGAPERVIIEHVREGFVTEKRAREMDGDMRRRAARNAKLFQEMQEKLNVQGKPSRADLWRYQSVQRQNCQCAYCGSPITFSNSEMDHIVPRAGQGSTNTRENLVAVCHRCNQSKGNTPFAIWAKNTSIEGVSVKEAVERTRHWVTDTGMRSTDFKKFTKAVVERFQRATMDEEIDARSMESVAWMANELRSRVAQHFASHGTTVRVYRGSLTAEARRASGISGKLEFLDGVGKSRLDRRHHAIDAAVIAFTSDYVAETLAVRSNLKQSQAHRQEAPQWREFTGKDAEHRAAWRVWCQKMEKLSALLTEDLRDDRVVVMSNVRLRLGNGSAHEETIGKLSKVKLGSQLSVSDIDKASSEALWCALTREPDFDPKDGLPANPERHIRVNGTHVYAGDNIGLFPVSAGSIALRGGYAELGSSFHHARVYKITSGKKPAFAMLRVYTIDLLPYRNQDLFSVELKPQTMSMRQAEKKLRDALATGNAEYLGWLVVDDELVVDTSKIATDQVKAVEAELGTIRRWRVDGFFGDTRLRLRPLQMSKEGIKKESAPELSKIIDRPGWLPAVNKLFSEGNVTVVRRDSLGRVRLESTAHLPVTWKVQ

SEQ ID NO: 165 - protein, 1084 aa, Corynebacterium diphtheriae
MKYHVGIDVGTFSVGLAAIEVDDAGMPIKTLSLVSHIHDSGLDPDKMKSAVTRLASSGIARRTRRLYRRKRRRLQQLDKFIQRQGWPVIELEDYSDPLYPWKVRAELAASYIADEKERGEKLSVALRHIARHRGWRNPYAKVSSLYLPDEPSDAFKSIREEIKRASGQPVPETATVGQMVTLCELGTLKLRGEGGVLSARLQQSDHAREIQEICRMQEIGQELYRKIIDVVFAAESPKGSASSRVGKDPLQPGKNRALKASDAFQRYRIAALIGNLRVRVDGEKRILSVEEKNLVFDHLVNLAPKKEPEWVTIAEILGIDRGQLIGTATMTDDGERAGARPPTHDTNRSIVNSRIAPLVDWWKTASALEQHAMVKALSNAEVDDFDSPEGAKVQAFFADLDDDVHAKLDSLHLPVGRAAYSEDTLVRLTRRMLADGVDLYTARLQEFGIEPSWTPPAPRIGEPVGNPAVDRVLKTVSRWLESATKTWGAPERVIIEHVREGFVTEKRAREMDGDMRRRAARNAKLFQEMQEKLNVQGKPSRADLWRYQSVQRQNCQCAYCGSPITFSNSEMDHIVPRAGQGSTNTRENLVAVCHRCNQSKGNTPFAIWAKNTSIEGVSVKEAVERTRHWVTDTGMRSTDFKKFTKAVVERFQRATMDEEIDARSMESVAWMANELRSRVAQHFASHGTTVRVYRGSLTAEARRASGISGKLEFLDGVGKSRLDRRHHAIDAAVIAFTSDYVAETLAVRSNLKQSQAHRQEAPQWREFTGKDAEHRAAWRVWCQKMEKLSALLTEDLRDDRVVVMSNVRLRLGNGSAHEETIGKLSKVKLGSQLSVSDIDKASSEALWCALTREPDFDPKDGLPANPERHIRVNGTHVYAGDNIGLFPVSAGSIALRGGYAELGSSFHHARVYKITSGKKPAFAMLRVYTIDLLPYRNQDLFSVELKPQTMSMRQAEKKLRDALATGNAEYLGWLVVDDELVVDTSKIATDQVKAVEAELGTIRRWRVDGFFGDTRLRLRPLQMSKEGIKKESAPELSKIIDRPGWLPAVNKLFSEGNVTVVRRDSLGRVRLESTAHLPVTWKVQ

SEQ ID NO: 166 - protein, 1084 aa, Corynebacterium diphtheriae
MKYHVGIDVGTFSVGLAAIEVDDAGMPIKTLSLVSHIHDSRLDPDKIKSAVTRLASSGIARRTRRLYRRKRRRLQQLDKFIQRQGWPVIELEDYSDPLYPWKVRAELAASYIADEKERGEKLSVALRHIARHRGWRNPYAKVSSLYLPDEPSDAFKAIREEIKRASGQPVPETATVGQMVTLCELGTLKLRGEGGVLSARLQQSDHAREIQEICRMQEIGQELYRKIIDVVFAAESPKGSASSRVGKDPLQPGKNRALKASDAFQRYRIAALIGNLRVRVDGEKRILSVEEKNLVFDHLVNLAPKKEPEWVTIAEILGIDRGQLIGTATMTDDGERAGARPPTHDTNRSIVNSRIAPLVDWWKTASALEQHAMVKALSNAEVDDFDSPEGAKVQAFFADLDDDVHAKLDSLHLPVGRAAYSEDTLVRLTRRMLADGVDLYTARLQEFGIEPSWTPPAPRIGEPVGNPAVDRVLKTVSRWLESATKTWGAPERVIIEHVREGFVTEKRAREMDGDMRRRAARNAKLFQEMQEKLNIQGKPSRADLWRYQSVQRQNCQCAYCGSPITFSNSEMDHIVPRAGQGSTNTRENLVAVCHRCNQSKGNTPFAIWAKNTSIEGVSVKEAVERTRHWVTDTGMRSTDFKKFTKAVVERFQRVTMDEEIDARSMESVAWMANELRSRVAQHFASRGTTVRVYRGSLTAEARRASGISGKLEFLDGVGKSRLDRRHHAIDAAVIAFTSDYVAETLAVRSNLKQSQAHRQEAPQWREFTGKDAEHRAAWRVWCQKMEKLSALLTEDLRDDRVVVMSNVRLRLGNGSAHEETIGKLSKVKLGSQLSVSDIDKASSEALWCALTREPDFDPKDGLPANPERHIRVNGTHVYAGDNIGLFPVSAGSIALRGGYAELGSSFHHARVYKITSGKKPAFAMLRVYTIDLLPYRNQDLFSVELKPQTMSMRQAEKKLRDALATGNAEYLGWLVVDDELVVDTSKIATDQVKAVEAELGTIRRWRVDGFFGDTRLRLRPLQMSKEGIKKESAPELSKIIDRPGWLPAVNKLFSEGNVTVVRRDSLGRVRLESTAHLPVTWKVQ

SEQ ID NO: 167 - protein, 1084 aa, Corynebacterium diphtheriae bv. intermedius str. NCTC 5011
MKYHVGIDVGTFSVGLAAIEVDDAGMPIKTLSLVSHIHDSGLDPDEIKSAVTRLASSGIARRTRRLYRRKRRRLQQLDKFIQRQGWPVIELEDYSDPLYPWKVRAELAASYIADEKERGEKLSVALRHIARHRGWRNPYAKVSSLYLPDGPSDAFKAIREEIKRASGQPVPETATVGQMVTLCELGTLKLRGEGGVLSARLQQSDHAREIQEICRMQEIGQELYRKIIDVVFAAESPKGSASSRVGKDPLQPGKNRALKASDAFQRYRIAALIGNLRVRVDGEKRILSVEEKNLVFDHLVNLAPKKEPEWVTIAEILGIDRGQLIGTATMTDDGERAGARPPTHDTNRSIVNSRIAPLVDWWKTASALEQHAMVKALSNAEVDDFDSPEGAKVQAFFADLDDDVHAKLDSLHLPVGRAAYSEDTLVRLTRRMLADGVDLYTARLQEFGIEPSWTPPAPRIGEPVGNPAVDRVLKTVSRWLESATKTWGAPERVIIEHVREGFVTEKRAREMDGDMQRRAARNAKLFQEMQEKLNVQGKPSRADLWRYQSVQRQNCQCAYCGSPITFSNSEMDHIVPRAGQGSTNTRENLVAVCHRCNQSKGNTPFAIWAKNTSIEGVSVKEAVERTRHWVTDTGMRSPDFKKFTKAVVERFQRATMDEEIDARSMESVAWMANELRSRVAQHFASHGTTVRVYRGSLTAEARRASGISGKLKFFDGVGKSRLDRRHHAIDAAVIAFTSDYVAETLAVRSNLKQSQAHRQEAPQWREFTGKDAEHRAAWRVWCQKMEKLSALLTEDLRDDRVVVMSNVRLRLGNGSAHKETIGKLSKVKLGSQLSVSDIDKASSEALWCALTREPDFDPKEGLPANPERHIRVNGTHVYAGDNIGLFPVSAGSIALRGGYAELGSSFHHARVYKITSGKKPAFAMLRVYTIDLLPYRNQDLFSVELKPQTMSMRQAEKKLRDALATGNAEYLGWLVVDDELVVDTSKIATDQVKAVEAELGTIRRWRVDGFFSPSKLRLRPLQMSKEGIKKESAPELSKIIDRPGWLPAVNKLFSDGNVTVVRRDSLGRVRLESTAHLPVTWKVQ

SEQ ID NO: 168 - protein, 1084 aa, Corynebacterium diphtheriae
MKYHVGIDVGTFSVGLAAIEVDDAGMPIKTLSLVSHIHDSGLDPDKIKSAVTRLASSGIARRTRRLYRRKRRRLQQLDKFIQRQGWPVIELEDYSDPLYPWKVRAELAASYIADEKERGEKLSVALRHIARHRGWRNPYAKVSSLYLPDEPSDAFKAIREEIKRASGQPVPETATVGQMVTLCELGTLKLRGEGGVLSARLQQSDHAREIQEICRMQEIGQELYRKIIDVVFAAESPKGSASSRVGKDPLQPGKNRALKASDAFQRYRIAALIGNLRVRVDGEKRILSVEEKNLVFDHLVNLAPKKEPEWVTIAEILGIDRGQLIGTATMTDDGERAGARPPTHDTNRSIVNSRIAPLVDWWKTASALEQHAMVKALSNAEVDDFDSPEGAKVQAFFADLDDDVHAKLDSLHLPVGRAAYSEDTLVRLTRRMLADGVDLYTARLQEFGIEPSWTPPAPRIGEPVGNPAVDRVLKTVSRWLESATKTWGAPERVIIEHVREGFVTEKRAREMDGDMRRRAARNAKLFQEMQEKLNVQGKPSRADLWRYQSVQRQNCQCAYCGSPITFSNSEMDHIVPRAGQGSTNTRENLVAVCHRCNQSKGNTPFAIWAKNTSIEGVSVKEAVERTRHWVTDTGMRSTDFKKFTKAVVERFQRATMDEEIDARSMESVAWMANELRSRVAQHFASHGTTVRVYRGSLTAEARRASGISGKLEFLDGVGKSRLDRRHHAIDAAVIAFTSDYVAETLAVRSNLKQSQAHRQEAPQWREFTGKDAEHRAAWRVWCQKMEKLSALLTEDLRDDRVVVMSNVRLRLGNGSAHEETIGKLSKVKLGSQLSVSDIDKASSEALWCALTREPDFDPKDGLPANPERHIRVNGTHVYAGDNIGLFPVSAGSIALRGGYAELGSSFHHARVYKITSGKKPAFAMLRVYTIDLLPYRNQDLFSVELKPQTMSMRQAEKKLRDALATGNAEYLGWLVVDDELVVDTSKIATDQVKAVEAELGTIRRWRVDGFFGDTRLRLRPLQMSKEGIKKESAPELSKIIDRPGWLPAVNKLFSEGNVTVVRRDSLGRVRLESTAHLPVTWKVQ

SEQ ID NO: 169 - protein, 1084 aa, Corynebacterium diphtheriae
MKYHVGIDVGTFSVGLAAIEVDDAGMPIKTLSLVSHIHDSGLDPDEIKSAVTRLASSGIARRTRRLYRRKRRRLQQLDKFIQRQGWPVIELEDYSDPLYPWKVRAELAASYIADEKERGEKLSVALRHIARHRGWRNPYAKVSSLYLPDGPSDAFKAIREEIKRASGQPVPETATVGQMVTLCELGTLKLRGEGGVLSARLQQSDHAREIQEICRMQEIGQELYRKIIDVVFAAESPKGSASSRVGKDPLQPGKNRALKASDAFQRYRIAALIGNLRVWVDGEKRILSVEEKNLVFDHLVNLTPKKEPEWVTIAEILGIDRGQLIGTATMTDDGERAGARPPTHDTNRSIVNSRIAPLVDWWKTASALEQHAMVKALSNAEVDDFDSPERAKVQAFFADLDDDVHAKLDSLHLPVGRAAYSEDTLVRLTRRMLSDGVDLYTARLQEFGIEPSWTPPTPRIGEPVGNPAVDRVLKTVSRWLESATKTWGAPERVIIEHVREGFVTEKRAREMDGDMRRRAARNAKLFQEMQEKLNVQGKPSRADLWRYQSVQRQNCQCAYCGSPITFSNSEMDHIVPRAGQGSTNTRENLVAVCHRCNQSKGNTPFAIWAKNTSIEGVSVKEAVERTRHWVTDTGMRSTDFKKFTKAVVERFQRATMDEEIDARSMESVAWMANELRSRVAQHFASHGTTVRVYRGSLTAEARRASGISGKLEFLDGVGKSRLDRRHHAIDAAVIAFTSDYVAETLAVRSNLKQSQAHRQEAPQWREFTGKDAEHRATWRVWCQKMEKLSALLTEDLRDDRVVVMSNVRLRLGNGSAHEETIGKLSKVKLGSQLSVSDIDKASSEALWCALTREPDFDPKDGLPANPERHIRVNGTHVYAGDNIGLFPVSAGSIALRGGYAELGSSFHHARVYKITSGKKPAFAMLRVYTIDLLPYRNQDLFSVELKPQTMSMRQAEKKLRDALATGNAEYLGWLVVDDELVVDTSKIATDQVKAVEAELGTIRRWRVDGFFGDTRLRLRPLQMSKEGIKKESAPELSKIIDRPGWLPAVNKLFSEGNVTVVRRDSLGRVRLESTAHLPVTWKVQ

SEQ ID NO: 170 - protein, 1084 aa, Corynebacterium diphtheriae
MKYHVGIDVGTFSVGLAAIEVDDAGMPIKTLSLVSHIHDSGLDPDEIKSAVTRLASSGIARRTRRLYRRKRRRLQQLDKFIQRQGWPVIELEDYSDPLYPWKVRAELAASYIADEKERGEKLSVALRHIARHRGWRNPYAKVSSLYLPDGPSDAFKAIREEIKRASGQPVPETATVGQMVTLCELGTLKLRGEGGVLSARLQQSDYAREIQEICRMQEIGQELYRKIIDVVFAAESPKGSASSRVGKDPLQPGKNRALKASDAFQRYRIAALIGNLRVRVDGEKRILSVEEKNLVFDHLVNLTPKKEPEWVTIAEILGIDRGQLIGTATMTDDGERAGARPPTHDTNRSIVNSRIAPLVDWWKTASALEQHAMVKALSNAEVDDFDSPEGAKVQAFFADLDDDVHAKLDSLHLPVGRAAYSEDTLVRLTRRMLSDGVDLYTARLQEFGIEPSWTPPTPRIGEPVGNPAVDRVLKTVSRWLESATKTWGAPERVIIEHVREGFVTEKRAREMDGDMRRRAARNAKLFQEMQEKLNVQGKPSRADLWRYQSVQRQNCQCAYCGSPITFSNSEMDHIVPRAGQGSTNTRENLVAVCHRCNQSKGNTPFAIWAKNTSIEGVSVKEAVERTRHWVTDTGMRSTDFKKFTKAVVERFQRATMDEEIDARSMESVAWMANELRSRVAQHFASHGTTVRVYRGSLTAEARRASGISGKLKFFDGVGKSRLDRRHHAIDAAVIAFTSDYVAETLAVRSNLKQSQAHRQEAPQWREFTGKDAEHRAAWRVWCQKMEKLSALLTEDLRDDRVVVMSNVRLRLGNGSAHKETIGKLSKVKLSSQLSVSDIDKASSEALWCALTREPGFDPKEGLPANPERHIRVNGTHVYAGDNIGLFPVSAGSIALRGGYAELGSSFHHARVYKITSGKKPAFAMLRVYTIDLLPYRNQDLFSVELKPQTMSMRQAEKKLRDALATGNAEYLGWLVVDDELVVDTSKIATDQVKAVEAELGTIRRWRVDGFFSPSKLRLRPLQMSKEGIKKESAPELSKIIDRPGWLPAVNKLFSDGNVTVVRRDSLGRVRLESTAHLPVTWKVQ

SEQ ID NO: 171 - protein, 1084 aa, Corynebacterium diphtheriae
MKYHVGIDVGTFSVGLAAIEVDDAGMPIKTLSLVSHIHDSGLDPDKMKSAVTRLASSGIARRTRRLYRRKRRRLQQLDKFIQRQGWPVIELEDYSDPLYPWKVRAELAASYIADEKERGEKLSVALRHIARHRGWRNPYAKVSSLYLPDEPSDAFKSIREEIKRASGQPVPETATVGQMVTLCELGTLKLRGEGGVLSARLQQSDHAREIQEICRMQEIGQELYRKIIDVVFAAESPKGSASSRVGKDPLQPGKNRALKASDSFQRYRIAALISNLRVRVDGEKRILSVEEKNLVFDHLVNLAPKKEPEWVTIAEILGIDRGQLIGTATMTDDGERAGARPPTHDTNRSIVNSRIAPLVDWWKTASALEQHAMVKALSNAEVDDFDSPEGAKVQAFFADLDDDVHAKLDSLHLPVGRAAYSEDTLVRLTRRMLADGVDLYTARLQEFGIEPSWTPPAPRIGEPVGNPAVDRVLKTVSRWLESATKTWGAPERVIIEHVRDGFVTEKRAREMDGDMRRRAARNAKLFQEMQEKLNVQGKPSRADLWRYQSVQRQNCQCAYCGSPITFSNSEMDHIVPRAGQGSTNTRENLVAVCHRCNQSKGNTPFAIWAKNTSIEGVSVKEAVERTRHWVTDTGMRSTDFKKFTKAVVERFQRATMDEEIDARSMESVAWMANELRSRVAQHFASHGTTVRVYRGSLTAEARRASGISGKLEFLDGVGKSRLDRRHHAIDAAVIAFTSDYVAETLAVRSNLKQSQAHRQEAPQWREFTGKDAEHRAAWRVWCQKMEKLSALLTEDLRDDRVVVMSNVRLRLGNGSAHEETIGKLSKVKLGSQLSVSDIDKASSEALWCALTREPDFDPKDGLPANPERHIRVNGTHVYAGDNIGLFPVSAGSIALRGGYAELGSSFHHARVYKITSGKKPAFAMLRVYTIDLLPYRNQDLFSVELKPQTMSMRQAEKKLRDALATGNAEYLGWLVVDDELVVDTSKIATDQVKAVEAELGTIRRWRVDGFFGDTRLRLRPLQMSKEGIKKELAPELSKIIDRPGWLPAVNKLFSEGNVTVVRRDSLGRVRLESTAHLPVTWKVQ

SEQ ID NO: 172 - protein, 1089 aa, Corynebacterium matruchotii ATCC 14266
MNSANVNYRVGIDVGSYSLGMAAIAIDDDGKPTEILSAISLIHDSGVDPDSAKSAATRLATSGIARRTRRLYRRKRKRLAKLDKFISSQGWPLKEFEKYEDPFYPWRVRAELATTAITDQQELGEKLSIALRHIARHRGWRNPYSKVTALYTVTEPSDAFLAMQEECAKQLGRTIPETITVGQLVTGMNLGKTRLRGENSLLAARPRQSDNANEIHTIAKVQGLSNELVRQIIDHVFAAESPKGSAAEQVGKDPLQPTKKRALKASDAFQQYRIAALIGNLRIRGGKGNRRLTTEETRLVFDYLRSLPAKQEPTWQLVAEQLKIDRGNLVGTAIMTDDGERAGAKPPVHDTNRIMENTKIKPLATWWKSADADARAAMVKALSNAEVDDFDSQAGAQVQEFFFGISDEDQEKLDGLHLPIGRAAYSEDTLDRLTKRMIGEGMDLYEARQAEFKISNDWAPPAPEIGERVGNPAVDRVLKATARWLNAAERQWGAPKSVNIEHVRAAFMSESSARELDRDNQQRAKRNVKVVAEMQEKLGIEGRPSRADVWRFQSIQRQNGKCAYCGAEISFKNSEMDHIIPQAGEGSTNTRDNLVAVCRECNSSKSNIAFAVWAENTSRPGVSVQKAIERTHHWVTDSGLRKPEFDKFRKQVCDRLRRKATDEPIDARSLESVAWMANELRSRIAQKFKDGDTKVRVYKGALTAEARRASGISGKLEFVDGKGKSRLDRRHHAVDAAVVAFTSNYVAETLALRSNMKFDQELRRKAPQWREFTGSDHVHQVEWTKWKYRMQALAELLNNALVQDRIVVMHNLRLRLGNGAAHEDTIGKLTRLKVGDAISTTDIDRASSEALWCALTRDPDYDPKTGLPENPNRTIRIHGTHLTASDEITVFPVAAASIPIRDGFAKLGSNYHHVRLFRVPSGKKYKYCLMQVYTVDLLKFRKEDLFTVELKPQTISVRTCEALLRKALANGTAEYLGWLVSDDELLIDTSSFDTPGIVKLREEYGPVNRWRLAGLTSVTRLNLRPLYLSKEGLKPNVNPEIKKIIDNRSWIITVNKLFSSGHVKIIRRDALGRPRLHSAAHLPICWEVK

SEQ ID NO: 173 - protein, 1069 aa, Corynebacterium matruchotii ATCC 33806
MAAIAIDDDGKPTEILSAISLIHDSGVDPDSAKSAATRLATSGIARRTRRLYRRKRKRLAKLDKFISSQGWPLKEFEKYEDPFYPWRVRAELATTAITDQQELGEKLSIALRHIARHRGWRNPYSKVTALYTVTEPSDAFLAMQEECAKQLGRTIPETITVGQLVTGMNLGKTRLRGENSLLAARPRQSDNANEIHTIAKVQGLSNELVRQIIDHVFAAESPKGSAAEQVGKDPLQPTKKRALKASDAFQQYRIAALIGNLRIRGGKGNRRLTTEETRLVFDYLRSLPAKQEPTWQLVAEQLKIDRGNLVGTAIMTDDGERAGAKPPVHDTNRIMENTKIKPLATWWKSADADARAAMVKALSNAEVDDFDSQAGAQVQEFFFGISDEDQEKLDGLHLPIGRAAYSEDTLDRLTKRMIGEGMDLYEARQAEFKISNDWAPPAPEIGERVGNPAVDRVLKATARWLNAAERQWGAPKSVNIEHVRAAFMSESSARELDRDNQQRAKRNVKVVAEMQEKLGIEGRPSRADVWRFQSIQRQNGKCAYCGAEISFKNSEMDHIIPQVGEGSTNTRDNLVAVCRECNSSKSNIAFAVWAENTSRPGVSVQKAIERTHHWVTDSGLRKPEFDKFRKQVCDRLRRKATDEPIDARSLESVAWMANELRSRIAQKFKDGDTKVRVYKGALTAEARRASGISGKLEFVDGKGKSRLDRRHHAVDAAVVAFTSNYVAETLALRSNMKFDQELRRKAPQWREFTGSDHVHQVEWTKWKYRMQALAELLNNALVQDRIVVMHNLRLRLGNGAAHEDTIGKLTRLKVGDAISTTDIDRASSEALWCALTRDPDYDPKTGLPENPNRTIRIHGTHLTASDEITVFPVAAASIPIRDGFAKLGSNYHHVRLFRVPSGKKYKYCLMQVYTVDLLKFRKEDLFTVELKPQTISVRTCEALLRKALANGTAEYLGWLVSDDELLIDTSSFDTPGIVKLREEYGPVNRWRLAGLTSVTRLNLRPLYLSKEGLKPNVNPEIKKIIDNRSWIITVNKLFSSGHVKIIRRDALGRPRLHSAAHLPICWEVK

SEQ ID NO: 174 - protein, 1079 aa, Dinoroseobacter shibae
MRLGLDIGTSSIGWWLYETDGAGSDARITGVVDGGVRIFSDGRDPKSGASLAVDRRAARAMRRRRDRYLRRRATLMKVLAETGLMPADPAEAKALEALDPFALRAAGLDEPLPLPHLGRALFHLNQRRGFKSNRKTDRGDNESGKIKDATARLDMEMMANGARTYGEFLHKRRQKATDPRHVPSVRTRLSIANRGGPDGKEEAGYDFYPDRRHLEEEFHKLWAAQGAHHPELTETLRDLLFEKIFFQRPLKEPEVGLCLFSGHHGVPPKDPRLPKAHPLTQRRVLYETVNQLRVTADGREARPLTREERDQVIHALDNKKPTKSLSSMVLKLPALAKVLKLRDGERFTLETGVRDAIACDPLRASPAHPDRFGPRWSILDADAQWEVISRIRRVQSDAEHAALVDWLTEAHGLDRAHAEATAHAPLPDGYGRLGLTATTRILYQLTADVVTYADAVKACGWHHSDGRTGECFDRLPYYGEVLERHVIPGSYHPDDDDITRFGRITNPTVHIGLNQLRRLVNRIIETHGKPHQIVVELARDLKKSEEQKRADIKRIRDTTEAAKKRSEKLEELEIEDNGRNRMLLRLWEDLNPDDAMRRFCPYTGTRISAAMIFDGSCDVDHILPYSRTLDDSFPNRTLCLREANRQKRNQTPWQAWGDTPHWHAIAANLKNLPENKRWRFAPDAMTRFEGENGFLDRALKDTQYLARISRSYLDTLFTKGGHVWVVPGRFTEMLRRHWGLNSLLSDAGRGAVKAKNRTDHRHHAIDAAVIAATDPGLLNRISRAAGQGEAAGQSAELIARDTPPPWEGFRDDLRVRLDRIIVSHRADHGRIDHAARKQGRDSTAGQLHQETAYSIVDDIHVASRTDLLSLKPAQLLDEPGRSGQVRDPQLRKALRVATGGKTGKDFENALRYFASKPGPYQAIRRVRIIKPLQAQARVPVPAQDPIKAYQGGSNHLFEIWRLPDGEIEAQVITSFEAHTLEGEKRPHPAAKRLLRVHKGDMVALERDGRRVVGHVQKMDIANGLFIVPHNEANADTRNNDKSDPFKWIQIGARPAIASGIRRVSVDEIGRLRDGGTRPI

SEQ ID NO: 175 - protein, 1332 aa, Dolosigranulum pigrum ATCC 51524
MQKNYTIGLDIGTNSVGWAVMKDDYTLIRKRMKVLGNTDIKKIKKNFWGVRLFDEGETAKETRLKRGTRRRYQRRRNRLIYLQDIFQQPMLAIDENFFHRLDDSFFVPDDKSYDRHPIFGSLEEEVAYHNTYPTIYHLRKHLADNPEKADLRLVYTALAHIVKYRGHFLIEGELNTENTSISETFEQFLDTYSDIFKEQLVGDISKVEEILSSKQSRSRKHEQIMALFPNENKLGNFGRFMMLIVGNTSNFKPVFDLDDEYKLKLSDETYEEDLDTLLGMTDDVFLDVFMAAKNVYDAVEMSAIISTDTGNSKAVLSNQMINFYDEHKVDLAQLKQFFKTHLPDKYYECFSDPSKNGYAGYIDGKTNQEDFYKYIEKVMKTIKSDKKDYFLDKIDREVFLRKQRSFYNSVIPHQIHLQEMQAILDRQSQYYPFLAENRDKIESLVTFRIPYYVGPLTVSDQSEFAWMERQSDEPIRPWNFDEIVNKERSAEKFIERMTNMDTYLLEEKVLPKRSLLYQTFEVYNELTKVRYTNEQGKTEKLNRQQKAEIIETLFKQKNRVREKDIANYLEQYGYVDGTDIKGVEDKFNASLSTYNDLAKIDGAKAYLDDPEYADVWEDIIKILTIFEDKAMRKKQLQTYSDTLSPEILKKLERKHYTGWGRFSKKLINGLRDEGSNKTILDYLKSDEGSSGPTNRNFMQLIRDNTLSFKKKIEDAQTIEDTTHIYDTVAELPGSPAIKKGIRQALKIVEEIIDIIGYEPENIVVEMARESQTTKKGKDLSKERLEKLTEAIKEFDGPSDVKVKDLKNENLRNDRLYLYYLQNGRDMYTNEPLDINNLSKYDIDHIIPQSFTTDNSIDNKVLVSRTKNQGNKSDDVPSINIVHKMKPFWRQLHKAGLISDRKFKNLTKAEHGGLTEADRAHFLNRQLVETRQITKHVANLLDSQYNTAEEQRINIVLLKSSMTSRFRKEFKLYKVREINDYHHGHDAYLNAVVATTIMKVYPNLKPQFVYGQYKKTSMFKEEKATARKHFYSNITKFFKKEKVVNEETGEILWDTERHLSTIKRVLSWKQMNIVKKVEKQKGQLWKETIYPKGDSSKLIPVKEGMDPQKYGGLSQVSEAFAVVITHEKGKKKQLKSDLISIPIVDQKAYEQHPTAYLEEAGYNNPTVLHELFKYQLFELEDGSRRMIASAKEFQKGNQMVLPLELVELLYHANRYDKVKFPDSIEYVHDNLAKFDDLLEYVIDFSNKYINADKNVQKIQKIYKEHGTEDVELTVESFVNLMTFTAMGAPATFKFYGESITRSRYTSITEFRGSTLIFQSITGLYETRYKLEDN

SEQ ID NO: 176 - protein, 1340 aa, Dorea longicatena DSM 13814
MEQEYYLGLDMGTGSVGWAVTDSEYHVLRKHGKALWGVRLFESASTAEERRMFRTSRRRLDRRNWRIEILQEIFAEEISKKDPGFFLRMKESKYYPEDKRDINGNCPELPYALFVDDDFTDKDYHKKFPTIYHLRKMLMNTEETPDIRLVYLAIHHMMKHRGHFLLSGDINEIKEFGTTFSKLLENIKNEELDWNLELGKEEYAVVESILKDNMLNRSTKKTRLIKALKAKSICEKAVLNLLAGGTVKLSDIFGLEELNETERPKISFADNGYDDYIGEVENELGEQFYIIETAKAVYDWAVLVEILGKYTSISEAKVATYEKHKSDLQFLKKIVRKYLTKEEYKDIFVSTSDKLKNYSAYIGMTKINGKKVDLQSKRCSKEEFYDFIKKNVLKKLEGQPEYEYLKEELERETFLPKQVNRDNGVIPYQIHLYELKKILGNLRDKIDLIKENEDKLVQLFEFRIPYYVGPLNKIDDGKEGKFTWAVRKSNEKIYPWNFENVVDIEASAEKFIRRMTNKCTYLMGEDVLPKDSLLYSKYMVLNELNNVKLDGEKLSVELKQRLYTDVFCKYRKVTVKKIKNYLKCEGIISGNVEITGIDGDFKASLTAYHDFKEILTGTELAKKDKENIITNIVLFGDDKKLLKKRLNRLYPQITPNQLKKICALSYTGWGRFSKKFLEEITAPDPETGEVWNIITALWESNNNLMQLLSNEYRFMEEVETYNMGKQTKTLSYETVENMYVSPSVKRQIWQTLKIVKELEKVMKESPKRVFIEMAREKQESKRTESRKKQLIDLYKACKNEEKDWVKELGDQEEQKLRSDKLYLYYTQKGRCMYSGEVIELKDLWDNTKYDIDHIYPQSKTMDDSLNNRVLVKKKYNATKSDKYPLNENIRHERKGFWKSLLDGGFISKEKYERLIRNTELSPEELAGFIERQIVETRQSTKAVAEILKQVFPESEIVYVKAGTVSRFRKDFELLKVREVNDLHHAKDAYLNIVVGNSYYVKFTKNASWFIKENPGRTYNLKKMFTSGWNIERNGEVAWEVGKKGTIVTVKQIMNKNNILVTRQVHEAKGGLFDQQIMKKGKGQIAIKETDERLASIEKYGGYNKAAGAYFMLVESKDKKGKTIRTIEFIPLYLKNKIESDESIALNFLEKGRGLKEPKILLKKIKIDTLFDVDGFKMWLSGRTGDRLLFKCANQLILDEKIIVTMKKIVKFIQRRQENRELKLSDKDGIDNEVLMEIYNTFVDKLENTVYRIRLSEQAKTLIDKQKEFERLSLEDKSSTLFEILHIFQCQSSAANLKMIGGPGKAGILVMNNNISKCNKISIINQSPTGIFENEIDLLKI

SEQ ID NO: 177 - protein, 1380 aa, Eggerthella sp. YY7918
MNLRHVGNYNIGLDMGTASVGWAAIDEQGELLHFKGKPTWGSRLFDSANTAATARMPRGQRRRYIRRRWRLDLLQKFFSEEMAEKDPEFFIRLRQSSLWPEDREGGHTAYHWPLFNDSDFNEKEYYEKFPTIFHLRQWLMETDEKADIRLIYLAFHNIVKHRGNFLQENNDSLSAQNANMRESLESFCIALEEWCDEKELTCSCDPQKLEHLFKEVKYRSDIRDGFAALLGLACSGENEVDVKAMAKEMGKAIVGYKADFSKIFTECDKEGSSFRLSDDEGPEAFLDICPDDGIALFEAIQMVYSSFILTGMLTEKGLSLSKISAYNQYGQDLESLKALVKEYVPNEYSSFFRGPTYSGSTEYDPSKAQGYTRYNLGPSKKGSGAKPMAYEDFKKSVEQLFANTNAINDERYKEMMGRFAEEKFLRRLRTSDNGRIPFQLNLEEMTAIIINQGKYYPFLLEQQEKLESLVRFRIPYYVGPLTRINARLDSKGNACFAWSKRKDGMDSASIKPWNWDEVIDKHASAQAFIERMTGTCTYLRGEPVLPRCSLLYEEYCVLNELNGARWTQDGDKFIRFDYKDRSDIIEELFKKRRGRIQYAAVADWMKQERSHANVHVSGGQGENAFESRLSSYHFFCNDVFGVDELPGSYVDMVEEIILWSTLFEDRSILREEIQRKYGDVLNEEQIKTICKKRFSGWGRLSRKLLCSLKAQTDNGPKSIMDILQEGDQNNGRVGRAMVFQEILHDEQLGFEQKIEEENTQSMLEGENLLIEDLPGSPAIRRSINQAVRIVDEIVGIAGHAPDNIFIEVTREDDTKKKGKRTTTRYSNIQKALEALKEEGAEALRELKTYKHNELDKRLSLYFMQNGKSLYSGIPLDIRRLSEYQIDHIIPQSYIKDDSYENMALVLPGENQSKADNLLISQDIRIKMKATWTALHKAGLMGDKKYNNLMNSSISDAKMKGFINRQLVETSQSVKLTQMMLSQKYPGAKVRPIKASISSQLRDACDLVKCREANDYHHAHDAYLACQVGRFVLKRHSSMFDNPIGMTKVIRDFVKRQGQEFKRNGKLPAYASRSGFIVQSFMRSGFDAETGELLRDDWNAPFEIARIKRCLNYRDCYISRMPMEDSGAFWDATIYSPKAGKKGALPVKQGLPVEKYGSYSREQFAYFFVYKAYNPKKKAYRLEFEAVPVRVASAVETRENALEEYAKSVAKQAGLEFVEVARPKVYKYQLIELGEDRLYITGKREVRNASQLAFSLDEIDLLKRLAEGEETSSEERERLFDVLIEKYARYAPRLARQLSVDSMSATFETLNAEEQLGILLSLVEIANGKRNMIDLSSAGGSKNAGCMNPTFSSELSSPGSNFTFIDQSVTGMFERRQRLEL

SEQ ID NO: 178 - protein, 1195 aa, Elusimicrobium minutum
MQKNINTKQNHIYIKQAQKIKEKLGDKPYRIGLDLGVGSIGFAIVSMEENDGNVLLPKEIIMVGSRIFKASAGAADRKLSRGQRNNHRHTRERMRYLWKVLAEQKLALPVPADLDRKENSSEGETSAKRFLGDVLQKDIYELRVKSLDERLSLQELGYVLYHIAGHRGSSAIRTFENDSEEAQKENTENKKIAGNIKRLMAKKNYRTYGEYLYKEFFENKEKHKREKISNAANNHKFSPTRDLVIKEAEAILKKQAGKDGFHKELTEEYIEKLTKAIGYESEKLIPESGFCPYLKDEKRLPASHKLNEERRLWETLNNARYSDPIVDIVTGEITGYYEKQFTKEQKQKLFDYLLTGSELTPAQTKKLLGLKNTNFEDIILQGRDKKAQKIKGYKLIKLESMPFWARLSEAQQDSFLYDWNSCPDEKLLTEKLSNEYHLTEEEIDNAFNEIVLSSSYAPLGKSAMLIILEKIKNDLSYTEAVEEALKEGKLTKEKQAIKDRLPYYGAVLQESTQKIIAKGFSPQFKDKGYKTPHTNKYELEYGRIANPVVHQTLNELRKLVNEIIDILGKKPCEIGLETARELKKSAEDRSKLSREQNDNESNRNRIYEIYIRPQQQVIITRRENPRNYILKFELLEEQKSQCPFCGGQISPNDIINNQADIEHLFPIAESEDNGRNNLVISHSACNADKAKRSPWAAFASAAKDSKYDYNRILSNVKENIPHKAWRFNQGAFEKFIENKPMAARFKTDNSYISKVAHKYLACLFEKPNIICVKGSLTAQLRMAWGLQGLMIPFAKQLITEKESESFNKDVNSNKKIRLDNRHHALDAIVIAYASRGYGNLLNKMAGKDYKINYSERNWLSKILLPPNNIVWENIDADLESFESSVKTALKNAFISVKHDHSDNGELVKGTMYKIFYSERGYTLTTYKKLSALKLTDPQKKKTPKDFLETALLKFKGRESEMKNEKIKSAIENNKRLFDVIQDNLEKAKKLLEEENEKSKAEGKKEKNINDASIYQKAISLSGDKYVQLSKKEPGKFFAISKPTPTTTGYGYDTGDSLCVDLYYDNKGKLCGEIIRKIDAQQKNPLKYKEQGFTLFERIYGGDILEVDFDIHSDKNSFRNNTGSAPENRVFIKVGTFTEITNNNIQIWFGNIIKSTGGQDDSFTINSMQQYNPRKLILSSCGFIKYRSPILKNKEG

SEQ ID NO: 179 - protein, 1337 aa, Enterococcus faecalis ATCC 29200
MKKDYVIGLDIGTNSVGWAVMTEDYQLVKKKMPIYGNTEKKKIKKNFWGVRLFEEGHTAEDRRLKRTARRRISRRRNRLRYLQAFFEEAMTDLDENFFARLQESFLVPEDKKWHRHPIFAKLEDEVAYHETYPTIYHLRKKLADSSEQADLRLIYLALAHIVKYRGHFLIEGKLSTENISVKEQFQQFMIIYNQTFVNGESRLVSAPLPESVLIEEELTEKASRTKKSEKVLQQFPQEKANGLFGQFLKLMVGNKADFKKVFGLEEEAKITYASESYEEDLEGILAKVGDEYSDVFLAAKNVYDAVELSTILADSDKKSHAKLSSSMIVRFTEHQEDLKKFKRFIRENCPDEYDNLFKNEQKDGYAGYIAHAGKVSQLKFYQYVKKIIQDIAGAEYFLEKIAQENFLRKQRTFDNGVIPHQIHLAELQAIIHRQAAYYPFLKENQEKIEQLVTFRIPYYVGPLSKGDASTFAWLKRQSEEPIRPWNLQETVDLDQSATAFIERMTNFDTYLPSEKVLPKHSLLYEKFMVFNELTKISYTDDRGIKANFSGKEKEKIFDYLFKTRRKVKKKDIIQFYRNEYNTEIVTLSGLEEDQFNASFSTYQDLLKCGLTRAELDHPDNAEKLEDIIKILTIFEDRQRIRTQLSTFKGQFSAEVLKKLERKHYTGWGRLSKKLINGIYDKESGKTILGYLIKDDGVSKHYNRNFMQLINDSQLSFKNAIQKAQSSEHEETLSETVNELAGSPAIKKGIYQSLKIVDELVAIMGYAPKRIVVEMARENQTTSTGKRRSIQRLKIVEKAMAEIGSNLLKEQPTTNEQLRDTRLFLYYMQNGKDMYTGDELSLHRLSHYDIDHIIPQSFMKDDSLDNLVLVGSTENRGKSDDVPSKEVVKDMKAYWEKLYAAGLISQRKFQRLTKGEQGGLTLEDKAHFIQRQLVETRQITKNVAGILDQRYNANSKEKKVQIITLKASLTSQFRSIFGLYKVREVNDYHHGQDAYLNCVVATTLLKVYPNLAPEFVYGEYPKFQTFKENKATAKAIIYTNLLRFFTEDEPRFTKDGEILWSNSYLKTIKKELNYHQMNIVKKVEVQKGGFSKESIKPKGPSNKLIPVKNGLDPQKYGGFDSPIVAYTVLFTHEKGKKPLIKQEILGITIMEKTRFEQNPILFLEEKGFLRPRVLMKLPKYTLYEFPEGRRRLLASAKEAQKGNQMVLPEHLLTLLYHAKQCLLPNQSESLAYVEQHQPEFQEILERVVDFAEVHTLAKSKVQQIVKLFEANQTADVKEIAASFIQLMQFNAMGAPSTFKFFQKDIERARYTSIKEIFDATIIYQSTTGLYETRRKVVD

SEQ ID NO: 180 - protein, 1337 aa, Enterococcus faecalis ATCC 4200
MKKDYVIGLDIGTNSVGWAVMTEDYQLVKKKMPIYGNTEKKKIKKNFWGVRLFEEGHTAEDRRLKRTARRRISRRRNRLRYLQAFFEEAMTALDENFFARLQESFLVPEDKKWHRHPIFAKLEDEVAYHETYPTIYHLRKKLADSSEQADLRLIYLALAHIVKYRGHFLIEGKLSTENISVKEQFQQFMIIYNQTFVNGESRLVSAPLPESVLIEEELTEKASRTKKSEKVLQQFPQEKANGLFGQFLKLMVGNKADFKKVFGLEEEAKITYASESYEEDLEGILAKVGDEYSDVFLAAKNVYDAVELSTILADSDKKSHAKLSSSMIVRFTEHQEDLKKFKRFIRENCPDEYDNLFKNEQKDGYAGYIAHAGKVSQLKFYQYVKKIIQDIAGAEYFLEKIAQENFLRKQRTFDNGVIPHQIHLAELQAIIHRQAAYYPFLKENQEKIEQLVTFRIPYYIGPLSKGDASTFAWLKRQSEEPIRPWNLQETVDLDQSATAFIERMTNFDTYLSSEKVLPKHSLLYEKFMVFNELTKISYTDDRGIKANFSGKEKEKIFDYLFKTRRKVKKKDIIQFYRNEYNTEIVTLSGLEEDQFNASFSTYQDLLKCGLTRAELDHPDNAEKLEDIIKILTIFEDRQRIRTQLSTFKGQFSAEVLKKLERKHYTGWGRLSKKLINGIYDKESGKTILGYLIKDDGVSKHYNRNFMQLINDSQLSFKNAIQKAQSSEHEETLSETVNELAGSPAIKKGIYQSLKIVDELVAIMGYAPKRIVVEMARENQTTSTGKRRSIQRLKIVEKAMAEIGSNLLKEQPTTNEQLRDTRLFLYYMQNGKDMYTGDELSLHRLSHYDIDHIIPQSFMKDDSLDNLVLVGSTENRGKSDDVPSKEVVKDMKAYWEKLYAAGLISQRKFQRLTKGEQGGLTLEDKAHFIQRQLVETRQITKNVAGILDQRYNANSKEKKVQIITLKASLTSQFRSIFGLYKVREVNDYHHGQDAYLNCVVATTLLKVYPNLAPEFVYGEYPKFQAFKENKATAKAIIYTNLLRFFTEDEPRFTKDGEILWSNSYLKTIKKELNYHQMNIVKKVEVQKGGFSKESIKPKGPSNKLIPVKNGLDPQKYGGFDSPVVAYTVLFTHEKGKKPLIKQEILGITIMEKTRFEQNPILFLEEKGFLRPRVLMKLPKYTLYEFPEGRRRLLASAKEAQKGNQMVLPEHLLTLLYHAKQCLLPNQSESLAYVEQHQPEFQEILERVVDFAEVHTLAKSKVQQIVKLFEANQTADVKEIAASFIQLMQFNAMGAPSTFKFFQKDIERARYTSIKEIFDATIIYQSTTGLYETRRKVVD

SEQ ID NO: 181 - protein, 1337 aa, Enterococcus faecalis D6
MKKDYVIGLDIGTNSVGWAVMTEDYQLVKKKMPIYGNTEKKKIKKNFWGVRLFEEGHTAEDRRLKRTARRRISRRRNRLRYLQAFFEEAMTALDENFFARLQESFLVPEDKKWHRHPIFAKLEDEVAYHETYPTIYHLRKKLADSSEQADLRLIYLALAHIVKYRGHFLIEGKLSTENISVKEQFQQFMIIYNQTFVNGESRLVSAPLPESVLIEEELTEKASRTKKSEKVLQQFPQEKANGLFGQFLKLMVGNKADFKKVFGLEEEAKITYASESYEEDLEGILAKVGDEYSDVFLAAKNVYDAVELSTILADSDKKSHAKLSSSMIVRFTEHQEDLKNFKRFIRENCPDEYDNLFKNEQKDGYAGYITHAGKVSQLKFYQYVKKIIQDIAGAEYFLEKIAQENFLRKQRTFDNGVIPHQIHLAELQAIIHRQAAYYPFLKENQEKIEQLVTFRIPYYVGPLSKGDANTFAWLKRQSEEPIRPWNLQETVDLDQSATAFIERMTNFDTYLPSEKVLPKHSLLYEKFMVFNELTKISYTDDRGIKANFSGKEKEKIFDYLFKTRRKVKKKDIIQFYRNEYNTEIVTLSGLEEDQFNASFSTYQDLLKCGLTRAELDHPDNAEKLEDIIKILTIFEDRQRIRTQLSTFKGQFSAEVLKKLERKHYTGWGRLSKKLINGIYDKESGKTILDYLIKDDGVSKHYNRNFMQLINDSQLSFKNAIQKAQSSEHEETLSETVNELAGSPAIKKGIYQSLKIVDELVAIMGYAPKRIVVEMARENQTTSTGKRRSIQRLKIVEKAMAEIGSNLLKEQPTTNEQLRDTRLFLYYMQNGKDMYTGDELSLHRLSHYDIDHIIPQSFMKDDSLDNLVLVGSTENRGKSDDVPSKEVVKDMKAYWEKLYAAGLISQRKFQRLTKGEQGGLTLEDKAHFIQRQLVETRQITKNVAGILDQRYNAKSKEKKVQIITLKASLTSQFRSIFGLYKVREVNDYHHGQDAYLNCVVATTLLKVYPNLAPEFVYGEYPKFQTFKENKATAKAIIYTNLLRFFTEDEPRFTKDGEILWSNSYLKTIKKELNYHQMNIVKKVEVQKGGFSKESIKPKGPSNKLIPVKNGLDPQKYGGFDSPIVAYTVLFTHEKGKKPLIKQEILGITIMEKTRFEQNPILFLEEKGFLRPRVLMKLPKYTLYQFPEGRRRLLASAKEAQKGNQMVLPEHLLTLLYHAKQCLLPNQSESLAYVEQHQPEFQEILERVVDFAEVHTLAKSKVQQIVKLFEANQTADVKEIAASFIQLMQFNAMGAPSTFKFFQKDIERARYTSIKEIFDATIIYQSTTGLYETRRKVVD

SEQ ID NO: 182 - protein, 1337 aa, Enterococcus faecalis E1Sol
MKKDYVIGLDIGTNSVGWAVMTEDYQLVKKKMPIYGNTEKKKIKKNFWGVRLFEEGHTAEDRRLKRTARRRISRRRNRLRYLQAFFEEAMTDLDENFFARLQESFLVPEDKKWHRHPIFAKLEDEVAYHETYPTIYHLRKKLADSSEQADLRLIYLALAHIVKYRGHFLIEGKLSTENTSVKEQFQQFMVIYNQTFVNGESRLVSAPLPESVLIEEELTEKASRTKKSEKVLQQFPQEKANGLFGQFLKLMVGNKADFKKVFGLEEEAKITYASESYEEDLEGILAKVGDEYSDVFLAAKNVYDAVELSTILADSDKKSHAKLSSSMIVRFTEHQEDLKKFKRFIRENCPDEYDNLFKNEQKDGYAGYIAHAGKVSQLKFYQYVKKIIQDIAGAEYFLEKIAQENFLRKQRTFDNGVIPHQIHLAELQAIIHRQAAYYPFLKENQEKIEQLVTFRIPYYVGPLSKGDASTFAWLKRQSEEPIRPWNLQETVDLDQSATAFIERMTNFDTYLPSEKVLPKHSLLYEKFMVFNELTKISYTDDRGIKANFSGKEKEKIFDYLFKTRRKVKKKDIIQFYRNEYNTEIVTLSGLEEDQFNASFSTYQDLLKCGLTRAELDHPDNAEKLEDIIKILTIFEDRQRIRTQLSTFKGQFSAEVLKKLERKHYTGWGRLSKKLINGIYDKESGKTILDYLVKDDGVSKHYNRNFMQLINDSQLSFKNAIQKAQSSEHEETLSETVNELAGSPAIKKGIYQSLKIVDELVAIMGYAPKRIVVEMARENQTTSTGKRRSIQRLKIVEKAMAEIGSNLLKEQPTTNEQLRDTRLFLYYMQNGKDMYTGDELSLHRLSHYDIDHIIPQSFMKDDSLDNLVLVGSTENRGKSDDVPSKKVVKKMKAYWEKLYAAGLISQRKFQRLTKGEQGGLTLEDKAHFIQRQLVETRQITKNVAGILDQRYNAKSKEKKVQIITLKASLTSQFRSIFGLYKVREVNDYHHGQDAYLNCVVATTLLKVYPNLAPEFVYGEYPKFQAFKENKATAKTIIYTNLMRFFTEDEPRFTKDSEILWSNSYLKTIKKELNYHQMNIVKKVEVQKGGFSKESIKPKGPSNKLIPVKNGLDPQKYGGFDSPVVAYTVLFTHEKGKKPLIKQEILGITIMEKTRFEQNPILFLEEKGFLRPRVLMKLPKYTLYEFPEGRRRLLASAKEAQKGNQMVLPEHLLTLLYHAKQCLLPNQSESLAYVEQHQPEFQEILERVVDFAEVHTLAKSKVQQIVKLFEANQTADVKEIAASFIQLMQFNAMGAPSTFKFFQKDIERARYTSIKEIFDATIIYQSTTGLYETRRKVVD

SEQ ID NO: 183 - protein, 1150 aa, Enterococcus faecalis Fly1
MYSIGLDLGISSVGWSVIDERTGNVIDLGVRLFSAKNSEKNLERRTNRGGRRLIRRKTNRLKDAKKILAAVGFYEDKSLKNSCPYQLRVKGLTEPLSKGEIYKVTLHILKKRGISYLDEDDTEAAKESQDYKEQVRKNAQLLTKYTPGQIQLQRLKENNRVKTGINAQGNYQLNVFKVSAYANELATILKTQQAFYPNELTDDWIALFVQPGIAEEAGLIYRKRPYYHGPGNEANNSPYGRWSDFKKTGQPATNIFDRLIGKDFQGELRASGLSLSAQQYNLLNDLTNLKIDGEIPLSPEQKEYILAELMTKEFTRFGVNDVAKLLGVKKERLSGWRLDKKGKPEIHTLKGYRNWRKIFAESGIDLATLPTETIDCLAKVLTLNTEHEGIENTLAFELPELAESVKLLVLDRYKELSQSVSTQAWHRFSLKTLHLLIPELMNATSEQNTLLEQFQLKSDVRKRYSEYKKLPTKDVLTEIYNPTVNKTVSQAFKVIDALLVKYGKEQIRYITIEMPRDDNEEDEKKRIKELHAKNSQRKNDSQSYFMQKSGWSQEKFQTTIQKNRRFLAKLLYYYEQDGICAYTGLSISPELLVSDSTEIDHIIPISISLDDSINNKVLVLSKANQVKGQQTPYDAWMDGSFKKINGKFSNWDDYQKWVESRHFSHKKENNLLETRNIFDSEQVEKFLARNLNDTRYASRLVLNTLQSFFANHETKVRVVNGSFTHTLRKKWGADLDKTRETHHHHAVDATLCAVTPFVKVSRYHYAVKEETGEKVMREIDFETGEIVDEMSYQEFKKSKKYERKTYQVKWPNFREQLKPVNLHPRIKFSHQVDRKANRKLSDATIYSVREKTEVKTLKSGKQKITTDEYTIGKIKDIYTVDGWEAFKKKQDKLLMKDLDEKTYERLLSIAETTPDFQEVEEKNGKVKRVKRSPFAVYCEENDIPAIQKYAKKNNGPLIRSLKYYDGKLNKHINITKDSQGRPVEKTKNGRKVTLQSLKPYRYDIYQDLETKAYYTVQLYYSDLRFVEGKYGITEKEYMKKVAEQTKGQVVRFCFSLQKNDGLEIEWKDSQRYDVRFYNFQSANSINFKGLEQEMMPAENQFKQKPYNNGAINLNIAKYGKEGKKLRKFNTDILGKKHYLYYEKEPKNIIK

SEQ ID NO: 184 - protein, 1337 aa, Enterococcus faecalis
MKKDYVIGLDIGTNSVGWAVMTEDYQLVKKKMPIYGNTEKKKIKKNFWGVRLFEEGHTAEDRRLKRTARRRISRRRNRLRYLQAFFEEAMTDLDENFFARLQESFLVPEDKKWHRHPIFAKLEDEVAYHETYPTIYHLRKKLADSSEQADLRLIYLALAHIVKYRGHFLIEGKLSTENISVKEQFQQFMIIYNQTFVNGESRLVSAPLPESVLIEEELTEKASRTKKSEKVLQQFPQEKANGLFGQFLKLMVGNKADFKKVFGLEEEAKITYASESYEEDLEGILAKVGDEYSDVFLAAKNVYDAVELSTILADSDKKSHAKLSSSMIVRFTEHQEDLKKFKRFIRENCPDEYDNLFKNEQKDGYAGYIAHAGKVSQLKFYQYVKKIIQDIAGAEYFLEKIAQENFLRKQRTFDNGVIPHQIHLAELQAIIHRQAAYYPFLKENQEKIEQLVTFRIPYYVGPLSKGDASTFAWLKRQSEEPIRPWNLQETVDLDQSATAFIERMTNFDTYLPSEKVLPKHSLLYEKFMVFNELTKISYTDDRGIKANFSGKEKEKIFDYLFKTRRKVKKKDIIQFYRNEYNTEIVTLSGLEEDQFNASFSTYQDLLKCGLTRAELDHPDNAEKLEDIIKILTIFEDRQRIRTQLSTFKGQFSAEVLKKLERKHYTGWGRLSKKLINGIYDKESGKTILDYLVKDDGVSKHYNRNFMQLINDSQLSFKNAIQKAQSSEHEETLSETVNELAGSPAIKKGIYQSLKIVDELVAIMGYAPKRIVVEMARENQTTSTGKRRSIQRLKIVEKAMAEIGSNLLKEQPTTNEQLRDTRLFLYYMQNGKDMYTGDELSLHRLSHYDIDHIIPQSFMKDDSLDNLVLVGSTENRGKSDDVPSKEVVKDMKAYWEKLYAAGLISQRKFQRLTKGEQGGLTLEDKAHFIQRQLVETRQITKNVAGILNQRYNANSKEKKVQIITLKASLTSQFRSIFGLYKVREVNDYHHGQDAYLNCVVATTLLKVYPNLAPEFVYGEYPKFQTFKENKATAKAIIYTNLLRFFTEDEPRFTKDGEILWSNSYLKTIKKELNYHQMNIVKKVEVQKGGFSKESIKPKGPSNKLIPVKNGLDPQKYGGFDSPVVAYTVLFTHEKGKKPLIKQEILGITIMEKTRFEQNPILFLEEKGFLRPRVLMKLPKYTLYEFPEGRRRLLASAKEAQKGNQMVLPEHLLTLLYHAKQCLLPNQSESLAYVEQHQPEFQEILERVVDFAEVHTLAKSKVQQIVKLFEANQTADVKEIAASFIQLMQFNAMGAPSTFKFFQKDIERARYTSIKEIFDATIIYQSTTGLYETRRKVVD

SEQ ID NO: 185 - protein, 1150 aa, Enterococcus faecalis R508
MYSIGLDLGISSVGWSVIDERTGNVIDLGVRLFSAKNSEKNLERRTNRGGRRLIRRKTNRLKDAKKILAAVGFYEDKSLKNSCPYQLRVKGLTEPLSKGEIYKVTLHILKKRGISYLDEDDTEAAKESQDYKEQVRKNAQLLTKYTPGQIQLQRLKENNRVKTGINVQGNYQLNVFKVSAYANELATILKTQQAFYPNELTDDWIALFVQPGIAEEAGLIYRKRPYYHGPGNEANNSPYGRWSDFQKTGEPATNIFDKLIGKDFQGELRASGLSLSAQQYNLLNDLTNLKIDGEVPLSSEQKEYILTELMTKEFTRFGVNDVVKLLGVKKERLSGWRLDKKGKPEIHTLKGYRNWRKIFAEAGIDLATLPTETIDCLAKVLTLNTEREGIENTLAFELPELSESVKLLVLDRYKELSQSISTQSWHRFSLKTLHLLIPELMNATSEQNTLLEQFQLKSDVRKRYSEYKKLPTKDVLAEIYNPTVNKTVSQAFKVIDALLVKYGKEQIRYITIEMPRDDNEEDEKKRIKELHAKNSQRKNDSQSYFMQKSGWSQEKFQTTIQKNRRFLAKLLYYYEQDGICAYTGLPISPELLVSDSTEIDHIIPISISLDDSINNKVLVLSKANQVKGQQTPYDAWMDGSFKKINGKFSNWDDYQKWVESRHFSHKKENNLLETRNIFDSEQVEKFLARNLNDTRYASRLVLNTLQSFFTNQETKVRVVNGSFTHTLRKKWGADLDKTRETHHHHAVDATLCAVTPFVKVSRYHYAVKEETGEKVMREIDFETGEIVNEMSYREFKKSKKYERKTYQVKWPNFREQLKPVNLHPRIKFSHQVDRKANRKLSDATIYSVREKTEVKTLKSGKQKITTDEYTIGKIKDIYTLDGWEAFKKKQDKLLMKDLDEKTYERLLSIAETTPDFQEVEEKNGKVKRVKRSPFAVYCEENDIPAIQKYAKKNNGPLIRSLKYYDGKLNKHINITKDSQGRPVEKTKNGRKVTLQSLKPYRYDIYQDLETKAYYTVQLYYSDLRFVEGKYGITEKEYMKKVAEQTKGQVVRFCFSLQKNDGLEIEWKDSQRYDVRFYNFQSANSINFKGLEQEIMPAENQFKQKPYNNGAINLNIAKYGKEGKKLRKFNTDILGKKHYLFYEKEPKNIIK

SEQ ID NO: 186 - protein, 1150 aa, Enterococcus faecalis T11
MYSIGLDLGISSVGWSVIDERTGNVIDLGVRLFSAKNSEKNLERRTNRGGRRLIRRKTNRLKDAKKILAAVGFYEDKSLKNSCPYQLRVKGLTEPLSKGEIYKVTLHILKKRGISYLDEDDTEAAKESQDYKEQVRENAQLLTKYTPGQIQLQRLKENNRVKTGINAQGNYQLNVFKVSAYANELATILKTQQAFYPNELTDDWIALFVQPGIAEEAGLIYRKRPYYHGPGNEANNSPYGRWSDFKKTGQPATNIFDKLIGKDFQGELRASGLSLSAQQYNLLNDLTNLKIDGEIPLSPEQKEYILAELMTKEFTRFGVNDVVKLLGVKKERLSGWRLDKKGKPEIHTLKGYRNWRKIFAESGIDLAMLPTETIDCLAKILTLNTEREGIENTLAFELPELAESVKLLVLDRYKELSQSVSTQAWHRFSLKTLHLLIPELMNATSEQNTLLEQFQLKSDVRKRYSEYKKLPTKDVLTEIYNPTVNKTVSQAFKVIDALLVKYGKEQIRYITIEMPRDDNEEDEKKRIKELHAKNSQRKNDSQSYFMQKSGWSQEKFQTTIQKNRRFLAKLLYYYEQDGICAYTGLSISPELLVSDSTEIDHIIPISISLDDSINNKVLVLSKANQVKGQQTPYDAWMDGSFKKINGKFSNWDDYQKWVESRHFSHKKENNLLETRNIFDSEQVEKFLARNLNDTRYASRLVLNTLQSFFANQETKVRVVNGSFTHTLRKKWGADLDKTRETHHHHAVDATLCAVTPFVKVSRYHYAVKEETGEKVMREIDFETGEIVDEMSYREFKKSKKYERKTYQVKWPNFREQLKPVNLHPRIKFSHQVDRKANRKLSDATIYSVREKTEVKTLKSGKQKITTDEYTIGKIKDIYTVDGWEAFKKKQDKLLMKDLDEKTYERLLSIAETTPDFQEVEEKNGKVKRVKRSPFAVYCEENDIPAIRKYAKKNNGPLIRSLKYYDGKLNKHINITKDSQGRPVEKTKNGRKVTLQSLKPYRYDIYQDLETKAYYTVQLYYSDLRFVEGKYGITEKEYMKKVAEQTKGQVVRFCFSLQKNDGLEIEWKDSQRYDVRFYNFQSANSINFKGLEQEMMPAENQFKQKPYNNGAINLNIAKYGKEGKKLRKFNTDILGKKHYLYYEKEPKNIIK

SEQ ID NO: 187 - protein, 1150 aa, Enterococcus faecalis TX0012
MYSIGLDLGISSVGWSVIDERTGNVIDLGVRLFSAKNSEKNLERRTNRGGRRLIRRKTNRLKDAKKILAAVGFYEDKSLKNSCPYQLRVKGLTEPLSRGEIYKVTLHILKKRGISYLDEVDTEAAKESQDYKEQVRKNAQLLTKYTPGQIQLQRLKENNRVKTGINAQGNYQLNVFKVSAYANELATILKTQQAFYPNELTDDWIALFVQPGIAEEAGLIYRKRPYYHGPGNEANNSPYGRWSDFQKTGEPATNIFDKLIGKDFQGELRASGLSLSAQQYNLLNDLTNLKIDGEVPLSSEQKEYILTELMTKEFTRFGVNDVVKLLGVKKERLSGWRLDKKGKPEIHTLKGYRNWRKIFAEAGIDLATLPTETIDCLAKVLTLNTEREGIENTLAFELPELSESVKLLVLDRYKELSQSISTQSWHRFSLKTLHLLIPELMNATSEQNTLLEQFQLKSDVRKRYSEYKKLPTKDVLAEIYNPTVNKTVSQAFKVIDALLVKYGKEQIRYITIEMPRDDNEEDEKKRIKELHAKNSQRKNDSQSYFMQKSGWSQEKFQTTIQKNRRFLAKLLYYYEQDGICAYTGLPISPELLVSDSTEIDHIIPISISLDDSINNKVLVLSKANQVKGQQTPYDAWMDGSFKKINGKFSNWDDYQKWVESRHFSHKKENNLLETRNIFDSEQVEKFLARNLNDTRYASRLVLNTLQSFFTNQETKVRVVNGSFTHTLRKKWGADLDKTRETHHHHAVDATLCAVTSFVKVSRYHYAVKEETGEKVMREIDFETGEIVNEMSYWEFKKSKKYERKTYQVKWPNFREQLKPVNLHPRIKFSHQVDRKANRKLSDATIYSVREKTEVKTLKSGKQKITTDEYTIGKIKDIYTLDGWEAFKKKQDKLLMKDLDEKTYERLLSIAETTPDFQEVEEKNGKVKRVKRSPFAVYCEENDIPAIQKYAKKNNGPLIRSLKYYDGKLNKHINITKDSQGRPVEKTKNGRKVTLQSLKPYRYDIYQDLETKAYYTVQLYYSDLRFVEGKYGITEKEYMKKVAEQTKGQVVRFCFSLQKNDGLEIEWKDSQRYDVRFYNFQSANSINFKGLEQEMMPAENQFKQKPYNNGAINLNIAKYGKEGKKLRKFNTDILGKKHYLFYEKEPKNIIK

SEQ ID NO: 188 - protein, 1150 aa, Enterococcus faecalis TX0012; identical to SEQ ID NO: 187

SEQ ID NO: 189 - protein, 1337 aa, Enterococcus faecalis TX0470
MKKDYVIGLDIGTNSVGWAVMTEDYQLVKKKMPIYGNTEKKKIKKNFWGVRLFEEGHTAEDRRLKRTARRRISRRRNRLRYLQAFFEEAMTALDENFFARLQESFLVPEDKKWHRHPIFAKLEDEVAYHETYPTIYHLRKKLADSSEQADLRLIYLALAHIVKYRGHFLIEGKLSTENISVKEQFQQFMIIYNQTFVNGESRLVSTPLPESVLIEEELTEKASRTKKSEKVLQQFPQEKANGLFGQFLKLMVGNKADFKKVFGLEEEAKITYASESYEEDLEGILAKVGDEYSDVFLAAKNVYDAVELSTILADSDKKSHAKLSSSMIVRFTEHQEDLKNFKRFIRENCPDEYDNLFKNEQKDGYAGYITHAGKVSQLKFYQYVKKIIQDIAGAEYFLEKIAQENFLRKQRTFDNGVIPHQIHLAELQAIIHRQAAYYPFLKENQEKIEQLVTFRIPYYVGPLSKGDASTFAWLKRQSEEPIRPWNLQETVDLDQSATAFIERMTNFDTYLPSEKVLPKHSLLYEKFMVFNELTKISYTDDRGIKANFSGKEKEKIFDYLFKTRRKVKKKDIIQFYRNEYNTEIVTLSGLEEDQFNASFSTYQDLLKCGLTRAELDHPDNAEKLEDIIKILTIFEDRQRIRTQLSTFKGQFSAEVLKKLERKHYTGWGRLSKKLINGIYDKESGKTILDYLVKDDGVSKHYNRNFMQLINDSQLSFKNAIQKAQSSEHEETLSETVNELAGSPAIKKGIYQSLKIVDELVAIMGYAPKRIVVEMARENQTTSTGKRRSIQRLKIVEKAMAEIGSNLLKEQPTTNEQLRDTRLFLYYMQNGKDMYTGDELSLHRLSHYDIDHIIPQSFMKDDSLDNLVLVGSTENRGKSDDVPSKEVVKDMKAYWEKLYAAGLISQRKFQRLTKGEQGGLTLEDKAHFIQRQLVETRQITKNVAGILDQRYNAKSKEKKVQIITLKASLTSQFRSIFGLYKVREVNDYHHGQDAYLNCVVATTLLKVYPNLAPEFVYGEYPKFQTFKENKATAKAIIYTNLLRFFTEDEPRFTKDGEILWSNSYLKTIKKELNYHQMNIVKKVEVQKGGFSKESIKPKGPSNKLIPVKNGLDPQKYGGFDSPIVAYTVLFTHEKGKKPLIKQEILGITIMEKTRFEQNPILFLEEKGFLRPRVLMKLPKYTLYEFPEGRRRLLASAKEAQKGNQMVLPEHLLTLLYHAKQCLLPNQSESLAYVEQHQPEFQEILERVVDFAEVHTLAKSKVQQIVKLFEANQTADVKEIAASFIQLMQFNAMGAPSTFKFFQKDIERARYTSIKEIFDATIIYQSTTGLYETRRKVVD

SEQ ID NO: 190 - protein, 1150 aa, Enterococcus faecalis TX1342
MYSIGLDLGVSSVGWSVIDERTGNVIDLGVRLFSAKNSEKNLERRTNRGGRRLIRRKTNRLKDAKKILAAVGFYEDKSLKNSCPYQLRVKGLTEPLSKGEIYKVTLHILKKRGISYLDEDDTEAAKESQDYKEQVRENAQLLTKYTPGQIQLQRLKENNRVKTGINAQGNYQLNVFKVSAYANELATILKTQQAFYPNELTDDWIALFVQPGIAEEAGLIYRKRPYYHGPGNEANNSPYGRWSDFKKTGQPATNIFDKLIGKDFQGELRASGLSLSAQQYNLLNDLTNLKIDGEIPLSPEQKEYILAELMTKEFTRFGINDVAKLLGVKKERLSGWRLDKKGKPEIHTLKGYRNWRKIFAESGIDLATLPTETIDCLAKVLTLNTEREGIENTLAFELPELAESVKLLVLDRYKELSQSVSTQAWHRFSLKTLHLLIPELMNATSEQNTLLEQFQLKSDVRKRYSEYKKLPTKDVLTEIYNPTVNKTVSQAFKVIDALLVKYGKEQIRYITIEMPRDDNEEDEKKRIKELHAKNSQRKNDSQSYFMQKSGWSQEKFQTTIQKNRRFLAKLLYYYEQDGICAYTGLSISPELLVSDSTEIDHIIPISISLDDSINNKVLVLSKANQVKGQQTPYDAWMDGSFKKINGKFSNWDDYQKWVESRHFSHKKENNLLETRNIFDSEQVEKFLARNLNDTRYASRLVLNTLQSFFANQETKVRVVNGSFTHTLRKKWGADLDKTRETHHHHAVDATLCAVTPFVKVSRYHYAVKEETGEKVMREIDFETGEIVDEMSYREFKKSKKYERKTYQVKWPNFREQLKPVNLHPRIKFSHQVDRKANRKLSDATIYSVREKTEVKTLKSGKQKITTDEYTIGKIKDIYTVDGWEAFKKKQDKLLMKDLDEKTYERLLSIAETTPDFQEVEEKNGKVKRVKRSPFAVYCEENDIPAIRKYAKNNNGPLIRSLKYYDGKLNKHINITKDSQGRPVEKTKNGRKVTLQSLKPYRYDIYQDLETKAYYTVQLYYSDLRFVEGKYGITEKEYMKKVAEQTKGQVVRFCFSLQKNDGLEIEWKDSQCYDVRFYNFQSANSINFKGLEQEMMPAENQFKQKPYNNGAINLNIAKYGKEGKKLRKFNTDILGKKHYLYYEKEPKNIIK

SEQ ID NO: 191 - protein, 1337 aa, Enterococcus faecalis TX4244
MKKDYVIGLDIGTNSVGWAVMTEDYQLVKKKMPIYGNTEKKKIKKNFWGVRLFEEGHTAEDRRLKRTARRRISRRRNRLRYLQAFFEEAMTDLDENFFARLQESFLVPEDKKWHRHPIFAKLEDEVAYHETYPTIYHLRKKLADSSEQADLRLIYLALAHIVKYRGHFLIEGKLSTENISVKEQFQQFMIIYNQTFVNGESRLVSAPLPESVLIEEELTEKASRTKKSEKVLQQFPQEKANGLFGQFLKLMVGNKADFKKVFGLEEEAKITYASESYEEDLEGILAKVGDEYSDVFLAAKNVYDAVELSTILADSDKKSHAKLSSSMIVRFTEHQEDLKKFKRFIRENCPDEYDNLFKNEQKDGYAGYIAHAGKVSQLKFYQYVKKIIQDIAGAEYFLEKIAQENFLRKQRTFDNGVIPHQIHLAELQAIIHRQAAYYPFLKENQEKIEQLVTFRIPYYVGPLSKGDASTFAWLKRQSEEPIRPWNLQETVDLDQSATAFIERMTNFDTYLPSEKVLPKHSLLYEKFMVFNELTKISYTDDRGIKANFSGKEKEKIFDYLFKTRRKVKKKDIIQFYRNEYNTEIVTLSGLEEDQFNASFSTYQDLLKCGLTRAELDHPDNAEKLEDIIKILTIFEDRQRIRTQLSTFKGQFSAEVLKKLERKHYTGWGRLSKKLINGIYDKESGKTILGYLIKDDGVSKHYNRNFMQLINDSQLSFKNAIQKAQSSEHEETLSETVNELAGSPAIKKGIYQSLKIVDELVAIMGYAPKRIVVEMARENQTTSTGKRRSIQRLKIVEKAMAEIGSNLLKEQPTTNEQLRDTRLFLYYMQNGKDMYTGDELSLHRLSHYDIDHIIPQSFMKDDSLDNLVLVGSTENLGKSDDVPSKEVVKDMKAYWEKLYAAGLISQRKFQRLTKGEQGGLTLEDKAHFIQRQLVETRQITKNVAGILDQRYNANSKEKKVQIITLKASLTSQFRSIFGLYKVREVNDYHHGQDAYLNCVVATTLLKVYPNLAPEFVYGEYPKFQTFKENKATAKAIIYTNLLRFFTEDEPRFTKDGEILWSNSYLKTIKKELNYHQMNIVKKVEVQKGGFSKESIKPKGPSNKLIPVKNGLDPQKYGGFDSPIVAYTVLFTHEKGKKPLIKQEILGITIMEKTRFEQNPILFLEEKGFLRPRVLMKLPKYTLYEFPEGRRRLLASAKEAQKGNQMVLPEHLLTLLYHAKQCLLPNQSESLAYVEQHQPEFQEILERVVDFAEVHTLAKSKVQQIVKLFEANQTADVKEIAASFIQLMQFNAMGAPSTFKFFQKDIERARYTSIKEIFDATIIYQSTTGLYETRRKVVD

SEQ ID NO: 192 - protein, 1339 aa, Enterococcus faecium 1,141,733
MKKEYTIGLDIGTNSVGWSVLTDDYRLVSKKMKVAGNTEKSSTKKNFWGVRLFDEGQTAEARRSKRTARRRLARRRQRILELQKIFAPEILKIDEHFFARLNESFLVLDEKKQSRHPVFATIKQEKSYHQTYPTIYHLRQALADSSEKADIRLVYLAMAHLLKYRGHFLIEGELNTENSSVTETFRQFLSTYNQQFSEADDKQTEKLDEAVDCSFVFTEKMSKTKKAETLLKYFPHEKSNGYLSQFIKLMVGNQGNFKNVFGLEEAKLQFSKETYEEDLEELLEKIGDDYIDLFVQAKNVYDAVLLSEILSDSTKNTRAKLSAGMIRRYDAHKEDLVLLKRFVKENLPKKYRAFFGDNSVNGYAGYIEGHATQEDFYKFVKKELTGIRGSEVFLTKIEQENFLRKQRTFDNGVIPHQIHLTELRAIIANQKKHYPFLKEEQEKLESLLTFKIPYYVGPLAKKQENSPFAWLIRKSEEKIKPWNLPEIVDMEGSAVRFIERMINTDMYMPHNKVLPKNSLLYQKFSIYNELTKVRYQDERGQMNYFSSIEKKEIFHELFEKNRKVTKKDLQEFLYLKYDIKHAELSGIEKAFNASYTTYHDFLTMSENKREMKQWLEDPELASMFEEIIKTLTVFEDREMIKTRLSHHEATLGKHIIKKLTKKHYTGWGRLSKELIQGIRDKQSNKTILDYLINDDDFPHHRNRNFMQLINDDSLSFKKEIKKAQMITDTENLEEIVKELTGSPAIKKGILQSLKIVDEIVGIMGYEPANIVVEMARENQTTGRGLKSSRPRLKALEESLKDFGSQLLKEYPTDNSSLQKDRLYLYYLQNGRDMYTGAPLDIHRLSDYDIDHIIPRSFTTDNSIDNKVLVSSKENRLKKDDVPSEKVVKKMRSFWYDLYSSKLISKRKLDNLTKIKLTEEDKAGFIKRQLVETRQITKHVAGILHHRFNKAEDTNEPIRKVRIITLKSALVSQFRNRFGIYKVREINEYHHAHDAYLNGVVALALLKKYPQLAPEFVYGEYLKFNAHKANKATVKKEFYSNIMKFFESDTPVCDENGEIFWDKSKSIAQVKKVINHHHMNIVKKTEIQKGGFSKETVEPKKDSSKLLPRKNNWDPAKYGGLGSPNVAYTVAFTYEKGKARKRTNALEGITIMEREAFEQSPVLFLKNKGYEQAEIEMKLPKYALFELENGRKRMVASNKEAQKANSFLLPEHLVTLLYHAKQYDEISHKESFDYVNEHHKEFSEVFARVLEFAGKYTLAEKNIEKLEKIYKENQTDDLAKLASSFVNLMQFNAMGAPADFKFFDVTIPRKRYTSLTEIWQSTIIHQSITGLYETRIRMGK

SEQ ID NO: 193 - protein, 1340 aa, Enterococcus faecium 1,231,408
MKKEYTIGLDIGTNSVGWSVLTDDYRLVSKKMKVAGNTEKSSTKKNFWGVRLFDEGQTAEARRSKRTARRRLARRRQRILELQKIFAPEILKIDEHFFARLNESFLVPDEKKQSRHPVFATIKQEKSYHQTYPTIYHLRQALADSSEKADIRLVYLAMAHLLKYRGHFLIEGELNTENSSVTETFRQFLSTYNQQFSEAGDKQTEKLDEAVDCSFVFTEKMSKTKKAETLLKYFPHEKSNGYLSQFIKLMVGNQGNFKNVFGLEEEAKLQFSKETYEEDLEELLEKIGDDYIDLFVQAKNVYDAVLLSEILSDSTKNTRAKLSAGMIRRYDAHKEDLVLLKRFVKENLPKKYRAFFGDNSVNGYAGYIEGHATQEAFYKFVKKELTGIRGSEVFLTKIEQENFLRKQRTFDNGVIPHQIHLSELRAIIANQKKHYPFLKEEQEKLESLLTFKIPYYVGPLAKKQENSPFAWLIRKSEEKIKPWNLPEIVDMEGSAVRFIERMINTDMYMPHNKVLPKNSLLYQKFSIYNELTKVRYQDERGQMNYFSSIEKKEIFHELFEKNRKVTKKDLQEFLYLKYDIKHAELSGIEKAFNASYTTYHDFLTMSENKREMKQWLEDPELASMFEEIIKTLTVFEDREMIKTRLSHHEATLGKHIIKKLTKKHYTGWGRLSKELIQGIRDKQSNKTILDYLINDDDFPHHRNRNFMQLINDDSLSFKKEIKKAQMITDTENLEEIVKELTGSPAIKKGILQSLKIVDEIVGIMGYEPANIVVEMARENQTTGRGLKSSRPRLKALEESLKDFGSQLLKEYPTDNSSLQKDRLYLYYLQNGRDMYTGAPLDIHRLSDYDIDHIIPRSFTTDNSIDNKVLVSSKENRLKKDDVPSEKVVKKMRSFWYDLYSSKLISKRKLDNLTKIKLTEEDKAGFIKRQLVETRQITKHVAGILHHRFNKAEDTNDPIRKVRIITLKSALVSQFRNRFGIYKVREINEYHHAHDAYLNGVVALALLKKYPQLAPEFVYGEYLKFNAHKANKATVKKEFYSNIMKFFESDTPVCDENGEIFWDKSKSIAQVKKVINHHHMNIVKKTEIQKGGFSKETVEPKKDSSKLLPRKNNWDPAKYGGLGSPNVAYTVAFTYEKGKARKRTNALEGITIMEREAFEQSPVLFLKNKGYEQAEIEMKLPKYALFELENGRKRMVASNKEAQKANSFLLPEHLVTLLYHAKQYDEISHKESFDYVNEHHKEFSEVFARVLEFAGKYTLAEKNIEKLEKIYKENQTDDLAKLASSFVNLMQFNAMGAPADFKFFDVTIPRKRYTSLTEIWQSTIIHQSITGLYETRIRMGK

SEQ ID NO: 194 - protein, 1339 aa, Enterococcus faecium E1133
MKKEYTIGLDIGTNSVGWSVLTDDYRLVSKKMKVAGNTEKSSTKKNFWGVRLFDEGQTAEARRSKRTARRRLARRRQRILELQKIFAPEILKIDEHFFARLNESFLVLDEKKQSRHPVFATIKQEKSYHQTYPTIYHLRQALADSSEKADIRLVYLAMAHLLKYRGHFLIEGELNTENSSVTETFRQFLSTYNQQFSEADDKQTEKLDEAVDCSFVFTEKMSKTKKAETLLKYFPHEKSNGYLSQFIKLMVGNQGNFKNVFGLEEAKLQFSKETYEEDLEELLEKIGDDYIDLFVQAKNVYDAVLLSEILSDSTKNTRAKLSAGMIRRYDAHKEDLVLLKRFVKENLPKKYRAFFGDNSVNGYAGYIEGHATQEDFYKFVKKELTGIRGSEVFLTKIEQENFLRKQRTFDNGVIPHQIHLTELRAIIANQKKHYPFLKEEQEKLESLLTFKIPYYVGPLAKKQENSPFAWLIRKSEEKIKPWNLPEIVDMEGSAVRFIERMINTDMYIPHNKVLPKNSLLYQKFSIYNELTKVRYQDERGQMNYFSSIEKKEIFHELFEKNRKVTKKDLQEFLYLKYDIKHAELSGIEKAFNASYTTYHDFLTMSENKREMKQWLEDPELASMFEEIIKTLTVFEDREMIKTRLSHHEATLGKHIIKKLTKKHYTGWGRLSKELIQGIRDKQSNKTILDYLINDDDFPHHRNRNFMQLINDDSLSFKKEIKKAQMITDTENLEEIVKELTGSPAIKKGILQSLKIVDEIVGIMGYEPANIVVEMARENQTTGRGLKSSRPRLKALEESLKDFGSQLLKEYPTDNSSLQKDRLYLYYLQNGRDMYTGAPLDIHRLSDYDIDHIIPRSFTTDNSIDNKVLVSSKENRLKKDDVPSEKVVKKMRSFWYDLYSSKLISKRKLDNLTKIKLTEEDKAGFIKRQLVETRQITKHVAGILHHRFNKAEDTNEPIRKVRIITLKSALVSQFRNRFGIYKVREINEYHHAHDAYLNGVVALALLKKYPQLAPEFVYGEYLKFNAHKANKATVKKEFYSNIMKFFESDTPVCDENGEIFWDKSKSIAQVKKVINHHHMNIVKKTEIQKGGFSEETVEPKKDSSKLLPRKNNWDPAKYGGLGSPNVAYTVAFTYEKGKARKRTNALEGITIMEREAFEQSPVLFLKNKGYEQAEIEMKLPKYALFELENGRKRMVASNKEAQKANSFLLPEHLVTLLYHAKQYDEISHKESFDYVNEHHKEFSEVFARVLEFAGKYTLAEKNIEKLEKIYKENQTDDLAKLASSFVNLMQFNAMGAPADFKFFDVTIPRKRYTSLTEIWQSTIIHQSITGLYETRIRMGK

SEQ ID NO: 195 - protein, 1340 aa, Enterococcus faecium E3083
MKKEYTIGLDIGTNSVGWSVLTDDYRLVSKKMKVAGNTEKSSTKKNFWGVRLFDEGQTAEARRSKRTARRRLARRRQRILELQKIFAPEILKIDEHFFARLNESFLVLDEKKQSRHPVFATIKQEKSYHQTYPTIYHLRQALADSSEKADIRLVYLAMAHLLKYRGHFLIEGELNTENSSVTETFRQFLSTYNQQFSEADDKQTEKLDEAVDCSFVFTEKMSKTKKAETLLKYFPHEKSNGYLSQFIKLMVGNQGNFKNVFGLEEEAKLQFSKETYEEDLEELLEKIGDDYIDLFVQAKNVYDAVLLSEILSDSTKNTRAKLSAGMIRRYDAHKEDLVLLKRFVKENLPKKYRAFFGDNSVNGYAGYIEGHATQEDFYKFVKKELTGIRGSEVFLTKIEQENFLRKQRTFDNGVIPHQIHLTELRAIIANQKKHYPFLKEEQEKLESLLTFKIPYYVGPLAKKQENSPFAWLIRKSEEKIKPWNLPEIVDMEGSAVRFIERMINTDMYIPHNKVLPKNSLLYQKFSIYNELTKVRYQDERGQMNYFSSIEKKEIFHELFEKNRKVTKKDLQEFLYLKYDIKHAELSGIEKAFNASYTTYHDFLTMSENKREMKQWLEDPELASMFEEIIKTLTVFEDREMIKTRLSHHEATLGKHIIKKLTKKHYTGWGRLSKELIQGIRDKQSNKTILDYLINDDDFPHHRNRNCMQLINDDSLSFKKEIKKAQMITDTENLEEIVKELTGSPAIKKGILQSLKIVDEIVGIMGYEPANIVVEMARENQTTGRGLKSSRPRLKALEESLKDFGSQLLKEYPTDNSSLQKDRLYLYYLQNGRDMYTGAPLDIHRLSDYDIDHIIPRSFTTDNSIDNKVLVSSKENRLKKDDVPSEKVVKKMRSFWYDLYSSKLISKRKLDNLTKIKLTEEDKAGFIKRQLVETRQITKHVAGILHHRFNKAEDTNEPIRKVRIITLKSALVSQFRNRFGIYKVREINEYHHAHDAYLNGVVALALLKKYPQLAPEFVYGEYLKFNAHKANKATVKKEFYSNIMKFFESDTPVCDENGEIFWDKSKSIAQVKKVINHHHMNIVKKTEIQKGGFSKETVEPKKDSSKLLPRKNNWDPTKYGGLGSPNVAYTVAFTYEKGKARKRTNALEGITIMEREAFEQSPVLFLKNKGYEQAEIEMKLPKYALFELENGRKRMVASNKEAQKANSFLLPEHLVTLLYHAKQYDEISHKESFDYVNEHHKEFSEVFARVLEFAGKYTLAEKNIEKLEKIYKENQTDDLAKLASSFVNLMQFNAMGAPADFKFFDVTIPRKRYTSLTEIWQSTIIHQSITGLYETRIRMGK

SEQ ID NO: 196 - protein, 1340 aa, Enterococcus faecium PC4.1
MKKEYTIGLDIGTNSVGWSVLTDDYRLVSKKMKVAGNTEKSSTKKNFWGVRLFDEGQTAEARRSKRTARRRLARRRQRILELQKIFAPEILKIDEHFFARLNESFLVLDEKKQSRHPVFATIKQEKSYHQTYPTIYHLRQALADSSEKADIRLVYLAMAHLLKYRGHFLIEGELNTENSSVTETFRQFLSTYNQQFSEADDKQTEKLDEAVDCSFVFTEKMSKTKKAETLLKYFPHEKSNGYLSQFIKLMVGNQGNFKNVFGLEEEAKLQFSKETYEEDLEELLEKIGDDYIDLFVQAKNVYDAVLLSEILSDSTKNTRAKLSAGMIRRYDAHKEDLVLLKRFVKENLPKKYRAFFGDNSVNGYAGYIEGHATQEDFYKFVKKELTGIRGSEVFLTKIEQENFLRKQRTFDNGVIPHQIHLTELRAIIANQKKHYPFLKEEQEKLESLLTFKIPYYVGPLAKKQENSPFAWLIRKSEEKIKPWNLPEIVDMEGSAVRFIERMINTDMYIPHNKVLPKNSLLYQKFSIYNELTKVRYQDERGQMNYFSSIEKKEIFHELFEKNRKVTKKDLQEFLYLKYDIKHAELSGIEKAFNASYTTYHDFLTMSENKREMKQWLEDPELASMFEEIIKTLTVFEDREMIKTRLSHHEATLGKHIIKKLTKKHYTGWGRLSKELIQGIRDKQSNKTILDYLINDDDFPHHRNRNFMQLINDDSLSFKKEIKKAQMITDTENLEEIVKELTGSPAIKKGILQSLKIVDEIVGIMGYEPANIVVEMARENQTTGRGLKSSRPRLKALEESLKDFGSQLLKEYPTDNSSLQKDRLYLYYLQNGRDMYTGAPLDIHRLSDYDIDHIIPRSFTTDNSIDNKVLVSSKENRLKKDDVPSEKVVKKMRSFWYDLYSSKLISKRKLDNLTKIKLTEEDKAGFIKRQLVETRQITKHVAGILHHRFNKAEDTNEPIRKVRIITLKSALVSQFRNRFGIYKVREINEYHHAHDAYLNGVVALALLKKYPQLAPEFVYGEYLKFNAHKANKATVKKEFYSNIMKFFESDTPVCDENGEIFWDKSKSIAQVKKVINHHHMNIVKKTEIQKGGFSKETVEPKKDSSKLLPRKNNWDPAKYGGLGSPNVAYTVAFTYEKGKARKRTNALEGITIMEREAFEQSPVLFLKNKGYEQAEIEMKLPKYALFELENGRKRMVASNKEAQKANSFLLPEHLVTLLYHAKQYDEISHKESFDYVNEHHKEFSEVFARVLEFAGKYTLAEKNIEKLEKIYKENQTDDLAKLASSFVNLMQFNAMGAPADFKFFDVTIPRKRYTSLTEIWQSTIIHQSITGLYETRIRMGK

SEQ ID NO: 197 - protein, 1340 aa, Enterococcus faecium TX1330
MKKEYTIGLDIGTNSVGWSVLTDDYRLVSKKMKVAGNTEKSSTKKNFWGVRLFDEGQTAEARRSKRTARRRLARRRQRILELQKIFAPEILKIDEHFFARLNESFLVLDEKKQSRHPVFATIKQEKSYHQTYPTIYHLRQALADSSEKADIRLVYLAMAHLLKYRGHFLIEGELNTENSSVTETFRQFLSTYNQQFSEADDKQTEKLDEAVDCSFVFTEKMSKTKKAETLLKYFPHEKSNGYLSQFIKLMVGNQGNFKNVFGLEEEAKLQFSKETYEEDLEELLEKIGDDYIDLFVQAKNVYDAVLLSEILSDSTKNTRAKLSAGMIRRYDAHKEDLVLLKRFVKENLPKKYRAFFGDNSVNGYAGYIEGHATQEDFYKFVKKELTGIRGSEVFLTKIEQENFLRKQRTFDNGVIPHQIHLTELRAIIANQKKHYPFLKEEQEKLESLLTFKIPYYVGPLAKKQENSPFAWLIRKSEEKIKPWNLPEIVDMEGSAVRFIERMNNTDMYIPHNKVLPKNSLLYQKFSIYNELTKVRYQDERGQMNYFSSIEKKEIFHELFEKNRKVTKKDLQEFLYLKYDIKHAELSGIEKAFNASYTTYHDFLTMSENKREMKQWLEDPELASMFEEIIKTLTVFEDREMIKTRLSHHEATLGKHIIKKLTKKHYTGWGRLSKELIQGIRDKQSNKTILDYLINDDDFPHHRNRNFMQLINDDSLSFKKEIKKAQMITDTENLEEIVKELTGSPAIKKGILQSLKIVDEIVGIMGYEPANIVVEMARENQTTGRGLKSSRPRLKALEESLKDFGSQLLKEYPTDNSSLQKDRLYLYYLQNGRDMYTGAPLDIHRLSDYDIDHIIPRSFTTDNSIDNKVLVSSKENRLKKDDVPSEKVVKKMRSFWYDLYSSKLISKRKLDNLTKIKLTEEDKAGFIKRQLVETRQITKHVAGILHHRFNKAEDTNEPIRKVRIITLKSALVSQFRNRFGIYKVREINEYHHAHDAYLNGVVALALLKKYPQLAPEFVYGEYLKFNAHKANKATVKKEFYSNIMKFFESDTPVCDENGEIFWDKSKSIAQVKKVINHHHMNIVKKTEIQKGGFSKETVEPKKDSSKLLPRKNNWDPAKYGGLGSPNVAYTVAFTYEKGKARKRTNALEGITIMEREAFEQSPVLFLKNKGYEQAEIEMKLPKYALFELENGRKRMVASNKEAQKANSFLLPEHLVTLLYHAKQYDEISHKESFDYVNEHHKEFSEVFARVLEFAGKYTLAEKNIEKLEKIYKENQTDDLAKLASSFVNLMQFNAMGAPADFKFFDVTIPRKRYTSLTEIWQSTIIHQSITGLYETRIRMGK

SEQ ID NO: 198 - protein, 1340 aa, Enterococcus faecium TX1337RF
MKKEYTIGLDIGTNSVGWSVLTDDYRLVSKKMKVAGNTEKSSTKKNFWGVRLFDEGQTAEARRSKRTARRRLARRRQRILELQKIFAPEILKIDEHFFARLNESFLVLDEKKQSRHPVFATIKQEKSYHQTYPTIYHLRQALADSSEKADIRLVYLAMAHLLKYRGHFLIEGELNTENSSVTETFRQFLSTYNQQFSEADDKQTEKLDEAVDCSFVFTEKMSKTKKAETLLKYFPHEKSNGYLSQFIKLMVGNQGNFKNVFGLEEEAKLQFSKETYEEDLEELLEKIGDDYIDLFVQAKNVYDAVLLSEILSDSTKNTRAKLSAGMIRRYDAHKEDLVLLKRFVKENLPKKYRAFFGDNSVNGYAGYIEGHATQEDFYKFVKKELTGIRGSEVFLTKIEQENFLRKQRTFDNGVIPHQIHLTELRAIIANQKKHYPFLKEEQEKLESLLTFKIPYYVGPLAKKQENSPFAWLIRKSEEKIKPWNLPEIVDMEGSAVRFIERMINTDMYMPHNKVLPKNSLLYQKFSIYNELTKVRYQDERGQMNYFSSIEKKEIFHELFEKNRKVTKKDLQEFLYLKYDIKHAELSGIEKAFNASYTTYHDFLTMSENKREMKQWLEDPELASMFEEIIKTLTVFEDREMIKTRLSHHEATLGKHIIKKLTKKHYTGWGRLSKELIQGIRDKQSNKTILDYLINDDDFPHHRNRNFMQLINDDSLSFKKEIKKAQMITDTENLEEIVKELTGSPAIKKGILQSLKIVDEIVGIMGYEPANIVVEMARENQTTGRGLKSSRPRLKALEESLKDFGSQLLKEYPTDNSSLQKDRLYLYYLQNGRDMYTGAPLDIHRLSDYDIDHIIPRSFTTDNSIDNKVLVSSKENRLKKDDVPSEKVVKKMRSFWYDLYSSKLISKRKLDNLTKIKLTEEDKAGFIKRQLVETRQITKHVAGILHHRFNKAEDTNEPIRKVRIITLKSALVSQFRNRFGIYKVREINEYHHAHDAYLNGVVALALLKKYPQLAPEFVYGEYLKFNAHKANKATVKKEFYSNIMKFFESDTPVCDENGEIFWDKSKSIAQVKKVINHHHMNIVKKTEIQKGGFSKETVEPKKDSSKLLPRKNNWDPAKYGGLGSPNVAYTVAFTYEKGKARKRTNALEGITIMEREAFEQSPVLFLKNKGYEQAEIEMKLPKYALFELENGRKRMVASNKEAQKANSFLLPEHLVTLLYHAKQYDEISHKESFDYVNEHHKEFSEVFARVLEFAGKYTLAEKNIEKLEKIYKENQTDDLAKLASSFVNLMQFNAMGAPADFKFFDVTIPRKRYTSLTEIWQSTIIHQSITGLYETRIRMGK

SEQ ID NO: 199 - protein, 1336 aa, Enterococcus hirae
MTKDYTIGLDIGTNSVGWAVLTDDYQLMKRKMSVHGNTEKKKIKKNFWGARLFDEGQTAEFRRTKRTNRRRLARRKYRLSKLQDLFAEELCKQDDCFFVRLEESFLVPEEKQYKPASIFPTLEEEKEYYQKYPTIYHLRQKLVDSTEKEDLRLVYLALAHLLKYRGHFLFEGDLDTENTSIEESFRVFLEQYSKQSDQPLIVHQPVLTILTDKLSKTKKVEEILKYYPTEKINSFFAQCLKLIVGNQANFKRIFDLEAEVKLQFSKETYEEDLESLLEKIGDEYLDIFLQAKKVHDAILLSEIISSTVKHTKAKLSSGMVERYERHKADLAKFKQFVKENVPQKATVFFKDTTKNGYAGYIKGKTTQEEFYKFVKKELSGVVGSEPFLEKIDQETFLLKQRTYTNGVIPHQVHLIELKAIIDQQKQHYPFLEEAGPKIIALFKFRIPYYVGPLAKEQEASSFAWIERKTAEKINPWNFSEVVDIEKSAMRFIQRMTKQDTYLPTEKVLPKNSLLYQKYMIFNELTKVSYKDERGVKQYFSGDEKQQIFKQLFQKERGKITVKKLQNFLYTHYHIENAQIFGIEKAFNASYSTYHDFMKLAKTNQKAMQEWLEQPEMEPIFEDIVKILTIFEDRQMIKHQLSKYQEVFGEKLLKEFARKHYTGWGRFSAKLIHGIRDRKTNKTILDYLINDDDVPANRNRNLMQLINDEHLSFKEEIAKATVFSKHKSLVDVIQDLPGSPAIKKGIWQSLKIVEELIAIIGYKPKNIVIEMARENQKTHRTSPRLKALENGLKQIGSTLLKEQPTDNKALQKERLYLYYLQNGRDMYTGEPLEIENLHQYEVDHIIPRSFIVDNSIDNKVLVASKQNQKKRDDVPKKQIVNEQRIFWNQLKEAKLISPKKYAYLTKIELTPEDKARFIQRQLVETRQITKHVANILHQSFNQEEEGTDCDGVQIITLKATLTSQFRQTFGLYKVREINPHHHAHDAYLNGFIANVLLKRYPKLAPEFVYGKYVKYSLARENKATAKKEFYSNILKFLESDEPFCDENGEIYWEKSHHLPRIKKVLSSHQVNVVKKVEQQKGGFYKETVNSKEKPDKLIERKNNWDVTKYGGFGSPVIAYAIAFVYAKGKTQKKTRAIEGITIMEQAAFEKDPTTFLKEKGFPQVTEFIKLPKYTLFEFDNGRRRFLASHKESQKGNPFILSDQLVTLLYHAQHYDKITYQESFDYVNTHLSDFSAILTEVLAFAEKYTLADKNIERIQELYEENKYGETSMIAQSFLQLLQFNAIGAPADFKFFGVTIPRKRYTSLTEIWDATIIYQSVTGLYETRIRMGDLWAGEQ

SEQ ID NO: 200 - protein, 1330 aa, Enterococcus italicus DSM 15952
MKNDYTIGLDIGTNSVGYSVVTDDYKVISKKMNVFGNTEKKSIKKNFWGVRLFESGQTAQEARMKRTSRRRIARRKNRICYLQEIFQPEMNHLDNNFFYRLNESFLVADDAKYDKHPIFGTLDEEIHFHEQFPTIYHLRKYLADGDEKADLRLVYLAIAHIIKFRGNFLIEGELNTENNSVIELSKVFVQLYNQTLSELEGFQFIDESIDFSEVLTQQLSKSERADNVLKLFPDEKGTGIFAQFIKLIVGNQGNFKKVFQLEEDQKLQLSTDDYEENIENLLAIIGDEYGDIFVAAQNLYQAILLAGILTSTEKTRAKLSASMIQRYEEHAKDLKLLKRFVKEHIPDKYAEIFNDATKNGYAGYIDGKTKEEEFYKYLKTTLVQKSGYQYFIEKIEQENFLRKQRIYDNGVIPHQVHAEELRAILRKQEKYYSFLKENHEKIEQIFKVRIPYYVGPLAKHNEQSRFAWNIRKSDEPIRPWNMNDVVDENASAVAFIERMTIKDIYLNENVLPRHSLIYEKFTVFNELTKVLYADDRGVFQRFSAEEKEDIFEKLFKSERKVTKKKLENYLRIELSISSPSVKGIEEQFNANFGTYLDLKKFDELHPYLDDEKYQDTLEEVIKVLTVFEDRSMIQNQLEQLPLNLSTKTIKALSRRKYTGWGRLSARLIDGIHDKNSGKTILDYLIEDESDSYIVNRNFMQLINDDHLSFKKIIEDSQPYKEQQSAEEIVSELSGSPAIKKGILQSLKIVDELVAIMGYKPKNIVVEMARENQTTGRGKQNSKPRLKGIENGLKEFSDSVLKGSSIDNKQLQNDRLYLYYLQNGKDMYTGHELDIDHLSTYDIDHIIPQSFLTDNSIDNRVLTTSKSNRGKSDNVPSEEVVRKMDRFWRKLLNAKLISERKYTNLTKKELTESDKAGFLKRQLVETRQITKHVATILDSKFNEDSNNRDVQIITLKSALVSEFRKTFNLYKVREINDLHHAHDAYLNAVVALSLLRVYPQLKPEFVYGEYGKNSIHDQNKATIKKQFYSNITRYFASKDYIINDDGEILWNKQETIAQVIKTLGMHQVNVVKKVEIQKGGFSKESIQPKGESQKLIRRKQQWNTKKYGGFDSPVVAYAILLSFDKGKRKARSFKIVGITIQDRESFEGNPILYLSKKDYHNPKVEAILPKYSLFEFENGRRRMVASASETQKGNQLIIPGHLMELLYHSKKIINGKNSDSVSYIQNNKEKFREIFEYIVDFSSKYISADANLNKIEKIFENNFHKASEQEIAKSFINLLTFTAMGAPADFEFFGEKIPRKRYVSISEIIDAVFIHQSITGLYETRVRLTEV

SEQ ID NO: 201 - protein, 1096 aa, Eubacterium dolichum DSM 3991
MMEVFMGRLVLGLDIGITSVGFGIIDLDESEIVDYGVRLFKEGTAAENETRRTKRGGRRLKRRRVTRREDMLHLLKQAGIISTSFHPLNNPYDVRVKGLNERLNGEELATALLHLCKHRGSSVETIEDDEAKAKEAGETKKVLSMNDQLLKSGKYVCEIQKERLRTNGHIRGHENNFKTRAYVDEAFQILSHQDLSNELKSAIITIISRKRMYYDGPGGPLSPTPYGRYTYFGQKEPIDLIEKMRGKCSLFPNEPRAPKLAYSAELFNLLNDLNNLSIEGEKLTSEQKAMILKIVHEKGKITPKQLAKEVGVSLEQIRGFRIDTKGSPLLSELTGYKMIREVLEKSNDEHLEDHVFYDEIAEILTKTKDIEGRKKQISELSSDLNEESVHQLAGLTKFTAYHSLSFKALRLINEEMLKTELNQMQSITLFGLKQNNELSVKGMKNIQADDTAILSPVAKRAQRETFKVVNRLREIYGEFDSIVVEMAREKNSEEQRKAIRERQKFFEMRNKQVADIIGDDRKINAKLREKLVLYQEQDGKTAYSLEPIDLKLLIDDPNAYEVDHIIPISISLDDSITNKVLVTHRENQEKGNLTPISAFVKGRFTKGSLAQYKAYCLKLKEKNIKTNKGYRKKVEQYLLNENDIYKYDIQKEFINRNLVDTSYASRVVLNTLTTYFKQNEIPTKVFTVKGSLTNAFRRKINLKKDRDEDYGHHAIDALIIASMPKMRLLSTIFSRYKIEDIYDESTGEVFSSGDDSMYYDDRYFAFIASLKAIKVRKFSHKIDTKPNRSVADETIYSTRVIDGKEKVVKKYKDIYDPKFTALAEDILNNAYQEKYLMALHDPQTFDQIVKVVNYYFEEMSKSEKYFTKDKKGRIKISGMNPLSLYRDEHGMLKKYSKKGDGPAITQMKYFDGVLGNHIDISAHYQVRDKKVVLQQISPYRTDFYYSKENGYKFVTIRYKDVRWSEKKKKYVIDQQDYAMKKAEKKIDDTYEFQFSMHRDELIGITKAEGEALIYPDETWHNFNFFFHAGETPEILKFTATNNDKSNKIEVKPIHCYCKMRLMPTISKKIVRIDKYATDVVGNLYKVKKNTLKFEFD

SEQ ID NO: 202 - protein, 1114 aa, [Eubacterium] rectale
MNYTEKEKLFMKYILALDIGIASVGWAILDKESETVIEAGSNIFPEASAADNQLRRDMRGAKRNNRRLKTRINDFIKLWENNNLSIPQFKSTEIVGLKVRAITEEITLDELYLILYSYLKHRGISYLEDALDDTVSGSSAYANGLKLNAKELETHYPCEIQQERLNTIGKYRGQSQIINENGEVLDLSNVFTIGAYRKEIQRVFEIQKKYHPELTDEFCDGYMLIFNRKRKYYEGPGNEKSRTDYGRFTTKLDANGNYITEDNIFEKLIGKCSVYPDELRAAAASYTAQEYNVLNDLNNLTINGRKLEENEKHEIVERIKSSNTINMRKIISDCMGENIDDFAGARIDKSGKEIFHKFEVYNKMRKALLEIGIDISNYSREELDEIGYIMTINTDKEAMMEAFQKSWIDLSDDVKQCLINMRKTNGALFNKWQSFSLKIMNELIPEMYAQPKEQMTLLTEMGVTKGTQEEFAGLKYIPVDVVSEDIFNPVVRRSVRISFKILNAVLKKYKALDTIVIEMPRDRNSEEQKKRINDSQKLNEKEMEYIEKKLAVTYGIKLSPSDFSSQKQLSLKLKLWNEQDGICLYSGKTIDPNDIINNPQLFEIDHIIPRSISFDDARSNKVLVYRSENQKKGNQTPYYYLTHSHSEWSFEQYKATVMNLSKKKEYAISRKKIQNLLYSEDITKMDVLKGFINRNINDTSYASRLVLNTIQNFFMANEADTKVKVIKGSYTHQMRCNLKLDKNRDESYSHHAVDAMLIGYSELGYEAYHKLQGEFIDFETGEILRKDMWDENMSDEVYADYLYGKKWANIRNEVVKAEKNVKYWHYVMRKSNRGLCNQTIRGTREYDGKQYKINKLDIRTKEGIKVFAKLAFSKKDSDRERLLVYLNDRRTFDDLCKIYEDYSDAANPFVQYEKETGDIIRKYSKKHNGPRIDKLKYKDGEVGACIDISHKYGFEKGSKKVILESLVPYRMDVYYKEENHSYYLVGVKQSDIKFEKGRNVIDEEAYARILVNEKMIQPGQSRADLENLGFKFKLSFYKNDIIEYEKDGKIYTERLVSRTMPKQRNYIETKPIDKAKFEKQNLVGLGKTKFIKKYRYDILGNKYSCSEEKFTSFC

SEQ ID NO: 203 - protein, 1391 aa, Eubacterium sp. AS15
MENKQYYIGLDVGTNSVGWAVTDTSYNLLRAKGKDMWGARLFDEAKTAVERRTKRTSRRRSEREKARKAMLKELFADEINKVDPNFFIRLEESKFFLDDRSENNRQRYTLFNDAKFTDKDYYEKYKTIFHLRSALINSDEKFDVRLVFLAILNLFSHRGHFLNASLKGDGEIQGVDIFYNDLYEVCEEFEIDLPQISNIDNFEKILSQKGKSRTKILEELSEELSISKKEKIKYSLLKLICGMKIKVVDIYADEDIQEDDKKKDLGFRESDYEKSSLEVKEIIGDDHFELIERAKAVHDIGLLANIIGNSKYLCEARVEAYDNHHKDLQKIKELLKKYDIKAYTDMFRKMTDKNYSAYVGSVNSNIAKERRSVDNRKIEDLYEYIKKIALKNISDDNEDKIEILKKIETGEFLKKQLTASNGVIPNQLQSRELRAILKKAENYLPFLKEKGEKNLTVSEMIIQLFEFQIPYYVGPLDKNPKKDKNANSWAVIPSGGRILPWNFEDKVDVKGSRKEFIEKMVRKCTYLSEEHTLPKQSLLYEKFMVLNEINNIKIDGEKISVEAKQKIYNDLFMKGKKVSQKAIKQELISLNIMSKDSVLSGIDTVCNAYLSSIAKFRGVFDENVNNQSTIDMIEDIIFLKTVYSDEKRFVKEEIVEKYGDEIDKDKIKRILGFKFSNWGNISKSFLELEGADVGTGEIRSIIQSLWETNFNLMELLSSRFTYMDELEKRVKKLEKPLSEWTIEDLDDMYLSSPVKRMIWQSMKIVDEIQTVIGYAPKRIFVEMTRSEGEKVRTKSRKDRLKELYSAIKEDSKQWVKELDAKDESYFRSKKMYLYYLQKGRCMYSGEVIELDKLMDDNLYDIDHIYPRSFVKDDSLDNLVLVKKEINNRKQNDPITPQIQASCQGFWKVLHEQGFISNEKYSRLTRKTQEFSDEEKLSFINRQIVETGQATKCMAQILQKSMGEDVDVVFSKARLVSEFRHKFELFKSRLINDFHHANDAYLNIVVGNSYFVKFTRNPANFIKDARKNPDNPAYKYHMDRFFERDVKSKSEVAWIGQSEGNAGTIAIVKKTMSKNSPLITKKVEEGHGSITKETIVGVKEIKFGRNKVEKADKTPKKANLQAYRPIKTSDERLCNILRYGGRTSISISGYCLVEYVKKRKTIRSLEAIPVYLGRKDSLSEEKLLNYFRYNLNDGGKDSVSDIRLCLPFISTNSLVKIDGYLYYLGGKNDDRIQLYNAYQLKMKKEEVEYIRKIEKAVSMSKFDEIDREKNPVLTEEKNIELYNKIQDKFENTVFSKRMSLVKYNKKDLSFGDFLKNKKSKFEEIDLEKQCKVLYNIIFNLSNLKEVDLSDIGGSKSTGKCRCKKNITNYKEFKLIQQSITGLYSCEKDLMTI

SEQ ID NO: 204 - protein, 1107 aa, Eubacterium ventriosum ATCC 27560
MGYTVGLDIGVASVGVAVLDENDNIVEAVSNIFDEADTSNNKVRRTLREGRRTKRRQKTRIEDFKQLWETSGYIIPHKLHLNIIELRNKGLTELLSLDELYCVLLSMLKHRGISYLEDADDGEKGNAYKKGLAFNEKQLKEKMPCEIQLERMKKYGKYHGEFIIEINDEKEYQSNVFTTKAYKKELEKIFETQRCNGNKINTKFIKKYMEIYERKREYYIGPGNEKSRTDYGIYTTRTDEEGNFIDEKNIFGKLIGKCSVYPEEYRASSASYTAQEFNLLNDLNNLKINNEKLTEFQKKEIVEIIKDASSVNMRKIIKKVIDEDIEQYSGARIDKKGKEIYHTFEIYRKLKKELKTINVDIDSFTREELDKTMDILTLNTERESIVKAFDEQKFVYEENLIKKLIEFRKNNQRLFSGWHSFSYKAMLQLIPVMYKEPKEQMQLLTEMNVFKSKKEKYVNYKYIPENEVVKEIYNPVVVKSIRTTVKILNALIKKYGYPESVVIEMPRDKNSDDEKEKIDMNQKKNQEEYEKILNKIYDEKGIEITNKDYKKQKKLVLKLKLWNEQEGLCLYSGKKIAIEDLLNHPEFFEIDHIIPKSISLDDSRSNKVLVYKTENSIKENDTPYHYLTRINGKWGFDEYKANVLELRRRGKIDDKKVNNLLCMEDITKIDVVKGFINRNLNDTRYASRVVLNEMQSFFESRKYCNTKVKVIRGSLTYQMRQDLHLKKNREESYSHHAVDAMLIAFSQKGYEAYRKIQKDCYDFETGEILDKEKWNKYIDDDEFDDILYKERMNEIRKKIIEAEEKVKYNYKIDKKCNRGLCNQTIYGTREKDGKIHKISSYNIYDDKECNSLKKMINSGKGSDLLMYNNDPKTYRDMLKILETYSSEKNPFVAYNKETGDYFRKYSKNHNGPKVEKVKYYSGQINSCIDISHKYGHAKNSKKVVLVSLNPYRTDVYYDNDTGKYYLVGVKYNHIKCVGNKYVIDSETYNELLRKEGVLNSDENLEDLNSKNITYKFSLYKNDIIQYEKGGEYYTERFLSRIKEQKNLIETKPINKPNFQRKNKKGEWENTRNQIALAKTKYVGKLVTDVLGNCYIVNMEKFSLVVDK

SEQ ID NO: 205 - protein, 1391 aa, Eubacterium yurii subsp. margaretiae ATCC 43715
MENKQYYIGLDVGTNSVGWAVTDTSYNLLRAKGKDMWGARLFEKANTAAERRTKRTSRRRSEREKARKAMLKELFADEINRVDPSFFIRLEESKFFLDDRSENNRQRYTLFNDATFTDKDYYEKYKTIFHLRSALINSDEKFDVRLVFLAILNLFSHRGHFLNASLKGDGDIQGMDVFYNDLVESCEYFEIELPRITNIDNFEKILSQKGKSRTKILEELSEELSISKKDKSKYNLIKLISGLEASVVELYNIEDIQDENKKIKIGFRESDYEESSLKVKEIIGDEYFDLVERAKSVHDMGLLSNIIGNSKYLCEARVEAYENHHKDLLKIKELLKKYDKKAYNDMFRKMTDKNYSAYVGSVNSNIAKERRSVDKRKIEDLYKYIEDTALKNIPDDNKDKIEILEKIKLGEFLKKQLTASNGVIPNQLQSRELRAILKKAENYLPFLKEKGEKNLTVSEMIIQLFEFQIPYYVGPLDKNPKKDNKANSWAKIKQGGRILPWNFEDKVDVKGSRKEFIEKMVRKCTYISDEHTLPKQSLLYEKFMVLNEINNIKIDGEKISVEAKQKIYNDLFVKGKKVSQKDIKKELISLNIMDKDSVLSGTDTVCNAYLSSIGKFTGVFKEEINKQSIVDMIEDIIFLKTVYGDEKRFVKEEIVEKYGDEIDKDKIKRILGFKFSNWGNLSKSFLELEGADVGTGEVRSIIQSLWETNFNLMELLSSRFTYMDELEKRVKKLEKPLSEWTIEDLDDMYLSSPVKRMIWQSMKIVDEIQTVIGYAPKRIFVEMTRSEGEKVRTKSRKDRLKELYNGIKEDSKQWVKELDSKDESYFRSKKMYLYYLQKGRCMYSGEVIELDKLMDDNLYDIDHIYPRSFVKDDSLDNLVLVKKEINNRKQNDPITPQIQASCQGFWKILHDQGFMSNEKYSRLTRKTQEFSDEEKLSFINRQIVETGQATKCMAQILQKSMGEDVDVVFSKARLVSEFRHKFELFKSRLINDFHHANDAYLNIVVGNSYFVKFTRNPANFIKDARKNPDNPVYKYHMDRFFERDVKSKSEVAWIGQSEGNSGTIVIVKKTMAKNSPLITKKVEEGHGSITKETIVGVKEIKFGRNKVEKADKTPKKPNLQAYRPIKTSDERLCNILRYGGRTSISISGYCLVEYVKKRKTIRSLEAIPVYLGRKDSLSEEKLLNYFRYNLNDGGKDSVSDIRLCLPFISTNSLVKIDGYLYYLGGKNDDRIQLYNAYQLKMKKEEVEYIRKIEKAVSMSKFDEIDREKNPVLTEEKNIELYNKIQDKFENTVFSKRMSLVKYNKKDLSFGDFLKNKKSKFEEIDLEKQCKVLYNIIFNLSNLKEVDLSDIGGSKSTGKCRCKKNITNYKEFKLIQQSITGLYSCEKDLMTI

SEQ ID NO: 206 - protein, 1142 aa, Facklamia hominis CCUG 36813
MYSVGLDIGIASCGYSIINDVNGNIVELGTLLFKSRNSDNNEERRTNRGSRRLINRRRTRLDDGKKLLAEKGFKQDSKLKHVCPYELRVKGLHEKLTQGEIYKVVLHILKKRGISYLDESDENSSGIDGASYKDQVNLNLNLQKELTPGQIQLKRLKENGRIKSGVTFENGYQLNVFSVSAYANELNKILTKQSEYYSEIDQIWIDRFTKNGYRKEAGLVYRKRPYYDGPGNEKNNSIYGRWANFKEDGHPKENIFDQLIGLDSVDSTQVRASASTLTAQKYNLLNDLNNLTIIEDDRKFTTDEKVSIINYLMTQDITRFGPKELAKFYQLEVDQIRGWRIDNKGNPEIHSLKVYRDWKKIFNTSSIDLTSIQTWVVDELANVITLNTEIPSTLATLKIKIPDIDQQILNFVENNFYELKKKTSKNSWHSFSLKTLNILIPELLNTSEEQNTILERLNLKFDLKNKYAEKNQIPVKELLEQIYNPTVTKSVHQSIKLFNEIIEKYGKNNISYVTIEMPRDKNDQDQKDTIKRINKLNSERKNDSEKYFLERSGWDTIRFESALKKPRFAEKLLFYYEQKGKCAYSGQDILAESLLNESCEVDHIIPLSISFDDSIHNKVLVTASSNQEKGQRTPYMAFIDGAKLGQSWDDFVAWVNSCGFHRKKVQNLLYEENIFNPDVQRGFVSRNLNDTRYASRIVLNAIQSFFYKQKDLTKVKVVNGSFTHTLRKKWGSSLDKNRDTYHHHAVDATLCAVTPFINIVKYEFFEEDGIKYMVDLTTGEKVAYSDYKKMKFYDKRAYVPIWDGFIKQLTPANLYPKIKFSHQVDSKWNRKISDATIYSTRKIVETKINKKGVAKETVKDIVIDKIKDIYTPEGWRKFKEKQDKLLMKNFDEKTYNKLIKIAKEYPEKKEVQTSNGKVSLVEVSPFKMYCEEQNVPAIRKYSKKGNGPYIRSLKFYDKELGKHINITKDSYGNDIERTIRNKKIILKNQNSWRTDVYYNSVNNCYELLGIKYCHLKFYRGKYGIPKSIYDELKKEDEISSESVFKFSLYRHDRVRFEKDGEYIEALFGSKNESNKNYLELSPIDKNKWLSKENVKFFGEVAASGRFIKGLKPGIKVIKQSTDYMGHVYAIHQEKLKFVLSDA

SEQ ID NO: 207 - protein, 1512 aa, Fibrobacter succinogenes
MKKILGLDLGTNSIGWAVVNADEITRDDGSRYLKPNGISAAGSRIIPMSADILGDFEKGNSISQTAERTRMRMARRLHERALLRRERLLRVLNLLDFLPKHFADKIDRYGKFTDDSEPKLAWRKNTEGKYEFIFQDAFNEMLAEFKDKQPEIVEEGKKIPYDWTIYYLRKKALEKALSKEELSWILLQFNQKRGYYQLRGEEEEIPQDKKIEYLAQKVVKVEATDQKKGDDVWYNVYLENGMIYRRTSKAPLDWEGKVKEFIVTTEVENDGETPKKDKEGNIKRSFRAPKEDDWTLLKKKTEADIENSHKTVGCYIYDSLLNNPKQKIIGKLVRTVERKFYKEELTQILKKQVELIPELRDDNLYKQCIEELYPINEAHRNTIAKTDFANLFINDILFYQRPLKSKKSQIDNCPYEERIFIDSKTGEKKKVPVKCIAKSNPLFQEFRLWQFIQNLRIYQREKEIDGKLLTDIDITSECLKSEEDYVRLFDWLNDRETIEQEDLLKHLFNTKKSKNKENPYRWNYVEDKVYPCNETRATILKGFSKCGINASVLSPELEMALWHILYSVEDKKEIETALTHFAQKQGWNDDFAKVFSKAKPFKKDYGSYSEKAIKKLLSLMRMGKYWNQDNIDKNTLDRIDKIINGEYDEKISNRVRDNAINLKDISDFRGLPVWLACYIVYDRHSEAKDCTKWNSPEEIDSYLKKFKQHSLRNPIVEQVVTETLRTVRDIWIQEEQIDEIHLELGRDLKNPADKRKKMSENILKNENTNLRIKAMLMEFMNPSMGIENVRPYSPSQQDILRIYEENALDNLTKDDKDFDFISKISKQAQPSKTDIIRYKCWLEQKYRSPYTGKTISLSKLFTPAYEIEHVIPQSLYFDDSFSNKVICEAEVNKLKDRQLGYKFIAEHHGEKVQLSQGEVVEILSVDAYEKFVKENYANNRIKMKKLLMESIPDEFIERQLNDSRYISKVVKGLLSNIVREKIDDENYEPEAVSKNLISCNGAITDRLKKDWGMNDVWNSIILPRFIRMNQITGKDCFTTTNAEGHLIPQMPLELQKGFNKKRIDHRHHAMDAIVIACTTRDHVNLLNNEAAHSKFNATRYQLQRKLRRFEKAVIDGKEREVAKEFLKPWDSFSSDSKNILENIIVSFKQNQRVINKTTNAFLHFDENGKKTFIKQGKGDSWAIRKSMHKDTVFGEINLRKVRSVSLNEAIKVPERVLNKKIKEKILELKNNKIDAKNIKKYIEENHTGGYGIDSSKIDVFYFTKETKERFFATRKTLDTSFNQAKIKDSIADSGIQKILLAHLKSKNGDAEQAFSPDGIDEMNKNIVELNNGKFHQPILKVRVYEKADKFAVGQKGNKKVKFVEAAKGTNLFFAIFEKDGKRSYLTIPLNVMIDCQKQYGNQWKNNIEAYLKEKELVEKDVKLQFILSPNDLVYLPTEGSIDKKRIYKVVSFTNNRLYAIPYAIAKSIVDKNEFTQLNKIEFTDNKESIKDACVPVIIDRLGNVIEFNGKRL

SEQ ID NO: 208 - protein, 1365 aa, Filifactor alocis
MTKEYYLGLDVGTNSVGWAVTDSQYNLCKFKKKDMWGIRLFESANTAKDRRLQRGNRRRLERKKQRIDLLQEIFSPEICKIDPTFFIRLNESRLHLEDKSNDFKYPLFIEKDYSDIEYYKEFPTIFHLRKHLIESEEKQDIRLIYLALHNIIKTRGHFLIDGDLQSAKQLRPILDTFLLSLQEEQNLSVSLSENQKDEYEEILKNRSIAKSEKVKKLKNLFEISDELEKEEKKAQSAVIENFCKFIVGNKGDVCKFLRVSKEELEIDSFSFSEGKYEDDIVKNLEEKVPEKVYLFEQMKAMYDWNILVDILETEEYISFAKVKQYEKHKTNLRLLRDIILKYCTKDEYNRMFNDEKEAGSYTAYVGKLKKNNKKYWIEKKRNPEEFYKSLGKLLDKIEPLKEDLEVLTMMIEECKNHTLLPIQKNKDNGVIPHQVHEVELKKILENAKKYYSFLTETDKDGYSVVQKIESIFRFRIPYYVGPLSTRHQEKGSNVWMVRKPGREDRIYPWNMEEIIDFEKSNENFITRMTNKCTYLIGEDVLPKHSLLYSKYMVLNELNNVKVRGKKLPTSLKQKVFEDLFENKSKVTGKNLLEYLQIQDKDIQIDDLSGFDKDFKTSLKSYLDFKKQIFGEEIEKESIQNMIEDIIKWITIYGNDKEMLKRVIRANYSNQLTEEQMKKITGFQYSGWGNFSKMFLKGISGSDVSTGETFDIITAMWETDNNLMQILSKKFTFMDNVEDFNSGKVGKIDKITYDSTVKEMFLSPENKRAVWQTIQVAEEIKKVMGCEPKKIFIEMARGGEKVKKRTKSRKAQLLELYAACEEDCRELIKEIEDRDERDFNSMKLFLYYTQFGKCMYSGDDIDINELIRGNSKWDRDHIYPQSKIKDDSIDNLVLVNKTYNAKKSNELLSEDIQKKMHSFWLSLLNKKLITKSKYDRLTRKGDFTDEELSGFIARQLVETRQSTKAIADIFKQIYSSEVVYVKSSLVSDFRKKPLNYLKSRRVNDYHHAKDAYLNIVVGNVYNKKFTSNPIQWMKKNRDTNYSLNKVFEHDVVINGEVIWEKCTYHEDTNTYDGGTLDRIRKIVERDNILYTEYAYCEKGELFNATIQNKNGNSTVSLKKGLDVKKYGGYFSANTSYFSLIEFEDKKGDRARHIIGVPIYIANMLEHSPSAFLEYCEQKGYQNVRILVEKIKKNSLLIINGYPLRIRGENEVDTSFKRAIQLKLDQKNYELVRNIEKFLEKYVEKKGNYPIDENRDHITHEKMNQLYEVLLSKMKKFNKKGMADPSDRIEKSKPKFIKLEDLIDKINVINKMLNLLRCDNDTKADLSLIELPKNAGSFVVKKNTIGKSKIILVNQSVTGLYENRREL

SEQ ID NO: 209 - protein, 1347 aa, Finegoldia magna ACS-171-V-Col3
MKSEKKYYIGLDVGTNSVGWAVTDEFYNILRAKGKDLWGVRLFEKAKTAADTRTFRSGRRRNDRKGMRLQILREIFEDEIKKVDKDFYDRLDESKFWAEDKKVSGKYSLFNDKNFSDKQYFEKFPTIFHLRKYLMEEHGKVDIRYYFLAINQMMKRRGHFLIDGQISHVTDDKPLKEQLILLINDLLKIELEEELMDSIFEILADVNEKRTDKKNNLKELIKGQDFNKQEGNILNSIFESIVTGKAKIKNIISDEDILEKIKEDNKEDFVLTGDSYEENLQYFEEVLQENITLFNTLKSTYDFVILQSILKGKSTLSDAQVERYDEHKKDLEILKKVIKKYDEDGKLFKQVFKEDNGNGYVSYIGYYLNKNKKITAKKKISNIEFTKYVKGILEKQCDCEDEAVKYLLGKIEQENFLLKQISSINSVIPHQIHLFELDKILENLAKNYPSFNNKKEEFTKIEKIRKTFTFRIPYYVGPLNDYHKNNGGNAWIFRNKGEKIRPWNFEKIVDLHKSEEEFIKRMLNQCTYLPEETVLPKSSILYSEYMVLNELNNLRIKGKPLDTDVKLKLIEELFKKKTKVTLKSIRDYMIRNNFADKEDFDNSEKNLEIVSNMKSYIDFNNILGDKFELEMVEDLIEKITIHTGNKTLLKKYIEETYPDLSSSQIQKIINLKYKDWGRLSRKLLDGIKGRNKTDDVNTVINFMRNSSDNLMQIIEGKNYSFNEYIDNLRKKYIPQEISYEVVENLYVSPSVKKMIWQVIRVTEEITKVMGYDPDKIFIEMAKSEEEKKTTISRKNKLLDLYKAIKKDERDSQYEKLLTGLNKLDESELRSKKLYLYYTQMGRDMYTGEKIDLDKLFDSTHYDKDHIIPQSMKKDDSIINNLVLVNKNANQTTKGNIYPVPSSIRNNPDIYNYWKYLMEKEFISKEKYNRLIRNTPLTNEELGVFINRQLVETRQSTKAIKELFEKFYQKSKIIPVKASLASDLRKDMNTLKSREVNDLHHAHDAFLNIVAGDVWNREFTSNPINYVNENREGDKVKYSLSKYFTRPRKSKGKVIWTPEKGRKLIVDTLNKPSVLISNESHVKKGELFNATISGKKDYKKGKIYLPLKKDDRLKDVSKYGGYKAINGAFFFLVEHTKSKKRIRSIELFPLHLLSKFYEDKNTVLDYAINVLQLQDPKIIIDKINYRTEIIIDNFSYLISTKSNDGSITVKPNEQMYWRVDEISNLKKIENKYKKDAILTEEDRKIMESYIDKIYQQFKAGKYKNRRTTDTIIEKYEIIDLDTLDNKQLYQLLVAFISLSYKTSNNAVDFTVIGLGTECGKPRITNLPDNTYLVYKSITGIYEKRIRIK

SEQ ID NO: 210 - protein, 1348 aa, Finegoldia magna
MKSEKKYYIGLDVGTNSVGWAVTDEFYNILRAKGKDLWGVRLFEKADTAANTRIFRSGRRRNDRKGMRLQILREIFEDEIKKVDKDFYDRLDESKFWAEDKKVSGKYSLFNDKNFSDKQYFEKFPTIFHLRKYLMEEHGKVDIRYYFLAINQMMKRRGHFLIDGQISHVTDDKPLKEQLILLINDLLKIELEEELMDSIFEILADVNEKRTDKKNNLKELIKGQDFNKQEGNILNSIFESIVTGKAKIKNIISDEDILEKIKEDNKEDFVLTGDSYEENLQYFEEVLQENITLFNTLKSTYDFLILQSILKGKSTLSDAQVERYDEHKKDLEILKKVIKKYDEDGKLFKQVFKEDNGNGYVSYIGYYLNKNKKITAKKKISNIEFTKYVKGILEKQCDCEDEDVKYLLGKIEQENFLLKQISSINSVIPHQIHLFELDKILENLAKNYPSFNNKKEEFTKIEKIRKTFTFRIPYYVGPLNDYHKNNGGNAWIFRNKGEKIRPWNFEKIVDLHKSEEEFIKRMLNQCTYLPEETVLPKSSILYSEYMVLNELNNLRINGKPLDTDVKLKLIEELFKKKTKVTLKSIRDYMVRNNFADKEDFDNSEKNLEIASNMKSYIDFNNILEDKFDVEMVEDLIEKITIHTGNKKLLKKYIEETYPDLSSSQIQKIINLKYKDWGRLSRKLLDGIKGTKKETEKTDTVINFLRNSSDNLMQIIGSQNYSFNEYIDKLRKKYIPQEISYEVVENLYVSPSVKKMIWQVIRVTEEITKVMGYDPDKIFIEMAKSEEEKKTTISRKNKLLDLYKAIKKDERDSQYEKLLTGLNKLDDSDLRSRKLYLYYTQMGRDMYTGEKIDLDKLFDSTHYDKDHIIPQSMKKDDSIINNLVLVNKNANQTTKGNIYPVPSSIRNNPKIYNYWKYLMEKEFISKEKYNRLIRNTPLTNEELGGFINRQLVETRQSTKAIKELFEKFYQKSKIIPVKASLASDLRKDMNTLKSREVNDLHHAHDAFLNIVAGDVWNREFTSNPINYVKENREGDKVKYSLSKDFTRPRKSKGKVIWTPEKGRKLIVDTLNKPSVLISNESHVKKGELFNATIAGKKDYKKGKIYLPLKKDDRLQDVSKYGGYKAINGAFFFLVEHTKSKKRIRSIELFPLHLLSKFYEDKNTVLDYAINVLQLQDPKIIIDKINYRTEIIIDNFSYLISTKSNDGSITVKPNEQMYWRVDEISNLKKIENKYKKDAILTEEDRKIMESYIDKIYQQFKAGKYKNRRTTDTIIEKYEIIDLDTLDNKQLYQLLVAFISLSYKTSNNAVDFTVIGLGTECGKPRITNLPDNTYLVYKSITGIYEKRIRIK

SEQ ID NO: 211 - protein, 1348 aa, Finegoldia magna SY403409CC001050417
MKSEKKYYIGLDVGTNSVGWAVTDEFYNILRAKGKDLWGVRLFEKAKTAADTRTFRSGRRRNDRKGVRLQILREIFEDEIKKVDKDFYDRLDESKFWAEDKKVSGKYSLFNDKNFSDKQYFEKFPTIFHLRKYLMEEHGKVDIRYYFLAINQMMKRRGHFLIDGQISHVTDDKPLKQQLILLINDLLKIELEEEFMDSIFEILADVNEKKTEKKNILKELINAQDFNKQEGKILYSIFESIVTGKAKIKNIISDEDILEKIKEDNKEDFVLTGDSYEENLQYFEEVLQENITLFNTLKSAYDFVILQSILKGKSTLSDAQVERYDEHKKDLEILKKVIKKYDEDGKLFKQVFKEDNGNGYVSYIGYYLNKNKKITAKKKISNIEFTKYVKGILEKQCDCEDEDVKYLLGKIEQENFLLKQISSINSVIPHQIHLFELDKILENLAKYYPSFNNKKEEFTKIEKIRKTFTFRIPYYVGPLNDYHKNNGGNAWIFRNKGEKIRPWNFEKIVDLHKSEEEFIKRMLNQCTYLPEETVLPKSSILYSEYMVLNELNNLRINGKPIDTDVKLKLIEELFKKKTKVTLKSIRDYMIRNNFADKEDFDNSEKNLEIVSNMKSYIDFNNILGDKFELEMVEDLIEKITIHTGNKKLLKKYIEETYPDLSSSQIQKIINLKYKDWGRLSRKLLDGITGTNIETGEIDTVINFLRNSSDNLMQIIGSQNYSFNNDIDKLRKKYIPQEISYEVVENLYVSPSVKKMIWQVIRITEEITKVMGYDPDKIFIEMAKSEEGKKTTISRKNKLLALYKAIKKDERDSQYEKLLTGLNKLDDSDLRSRKLYLYYTQMGRDMYTGEKIDLDKLFDSTHYDKDHIIPQSMKKDDSIINNLVLVNKNANQTTKGNIYPVPSSIRNNPKIYNYWKYLMEKEFISKEKYNRLIRNTPLTNEELGGFINRQLVETRQSTKAIKELFEKFYKKSKIIPVKAILASDLRKDMNTLKSREVNDLHHAHDAFLNIVAGDVWNREFTSNPINYVKENREGDKVKYSLSKYFTRPRKSKGKVIWTPEKGRKLIVDTLNKPSVLISNESHVKKGELFNATIAGKKDYKKGKIYLPLKKDDRLQDVSKYGGYKAINGAFFFLVEHTKSKKRIRSIELFPLHLLSKFYEDKNTVLDYAINVLQLQDPKIIIDKINYRTEIIIDNFSYLISTKSNDGSITVKPNEQMYWRVDEISNLKKIENKYKKDAILTEEDRKIMESYIDKIYQQFKAGKYKNRRTTDTIIEKYEIIDLDTLDNKQLYQLLVAFISLSYKTSNNAVDFTVIGLGTECGKPRITNLPDNTYLVYKSITGIYEKRIRIK

SEQ ID NO: 212 - protein, 1516 aa, Flavobacteriaceae bacterium S85
MLKQQKDKIIGMNKKILGLDLGTNSIGWALVKQDLENKYGEIIGCGSRIIPMSQDVLGKFDAGISISQTAERTNYRSVRKLIQRNTLRRERLHRVLHQLDFLPKHYNDSIDFEKKLGQFKTDKETKLNYFVNQHGKHEFLFKDSFNEMVKEFKEEQPELFYIKNNGKETKIPYDWTIYYLRKKALSKKISKEELSWLVLNFNQKRGYYQLRGEIDEEKEKNKRYEKLYVSEVVKTNNTIKKTGEYLYDIYFDNGWKYEKQTTKPQDWLHKHKEFIITTTTLKNGETKRTFKTVDSEKDWIAIKSKTEQDIKESNKTVGAFIYDTLLKNPTQKIRGSLVKTIERKFYREEFEKILKEQIKHRPEINVNTAIGKENYTKCVTELYPRNEAHANNILTNDFNYLFTKDILFYQRPLKSKKSEIANCQYEYRTYIKKKEKTGKEERVKQPLKATPKSHPLFQEFRLWQFIHNLKIYIRETTVGNKPLFDVDITDTFFTSENDWATLFEYLNNKKEIEQKHVLEYLVSKKIISKSEKTDYRWNYVEDKKYPGNETRVDFINRLKKVENLNVDEFLTSELEFKLWHIIYSVTDKNEYEKALENFAIRQNIDKDSFVNSFKKFPPFKSDYGAYSTKAIKKLLPLMRLGKFWDGSEIPKVVVEKITDIKTRLTSVNYDESLFKKDEKKILETIVDDITPKQLLKSFVKLKGKNHLAGLNTYQACYLVYERHSESSDITQWENPDDIDSFLNHFKQHSLRNPIVEQVVTETLRTVRDIWKYYGNGSPNYFNEIHIELGREMKNPADKRKQMSAKINENENTNQRIKGILQELMNDGVQDIKPYSPSQQEILKIYEEGISQNPNVDYSKVSEDEITKIKKSNNPTLKEIQRYKLWLEQKYISPYTGKPIPLSELFTPAYQIEHIIPQSRYFDNSLSNKIICESEVNEDKSNKTAYEYLKTNGGSIVHGHHLLSLKEYEDHCQHYFKKNRTKLKNLLSEEIPEGFINRQLNDSRYISKLIKGLLSNIVREENEQEATSKNIVPVTGSITSKLKQDWGLNDKWNEIIAPRFKRLNKMTNSNDFGYFDEKINTFRIQVPDAISRGFNKKRIDHRHHTLDALVIACCTKKHIQYLNSLNNEIIKHELKPSILIKNAQGDYTKHFMLPWNNFPIDCKNAIENTIVSFKQNLRVINKTSNKYQSYKDENGNLRLGKDGKPKKGLTKQTKGNNWAVRKAMHEDTFYGEIVDGENKGKLKIKTLLDTSFDVKKIEDKVLDKSIRTILINYLKQDKYKNLSKPHEEAFSPNGIIEMNKNIISLNNNIPHKPIKRVTLKHEKGKKFSIKTLLDKKTKFAKSATGTNVFFCIYKNINGKIKYHTPSFEEIIEIQKQEFEIKYKSKLNVPETLFDKKESFELLFYLQPNDLVYLPNDEELKNRQLIDFNNLNKKQIKRIYKFTDGSGTTANFIPYQVAKVIFNLNKKEQAKSSFKYPIQNEFGVGSPQSKNQKSIEGILIKERCIKLKIDRLGNISKA

SEQ ID NO: 213 - protein, 1473 aa, Flavobacterium branchiophilum
MAKILGLDLGTNSIGWAVVERENIDFSLIDKGVRIFSEGVKSEKGIESSRAAERTGYRSARKIKYRRKLRKYETLKVLSLNRMCPLSIEEVEEWKKSGFKDYPLNPEFLKWLSTDEESNVNPYFFRDRASKHKVSLFELGRAFYHIAQRRGFLSNRLDQSAEGILEEHCPKIEAIVEDLISIDEISTNITDYFFETGILDSNEKNGYAKDLDEGDKKLVSLYKSLLAILKKNESDFENCKSEIIERLNKKDVLGKVKGKIKDISQAMLDGNYKTLGQYFYSLYSKEKIRNQYTSREEHYLSEFITICKVQGIDQINEEEKINEKKFDGLAKDLYKAIFFQRPLKSQKGLIGKCSFEKSKSRCAISHPDFEEYRMWTYLNTIKIGTQSDKKLRFLTQDEKLKLVPKFYRKNDFNFDVLAKELIEKGSSFGFYKSSKKNDFFYWFNYKPTDTVAACQVAASLKNAIGEDWKTKSFKYQTINSNKEQVSRTVDYKDLWHLLTVATSDVYLYEFAIDKLGLDEKNAKAFSKTKLKKDFASLSLSAINKILPYLKEGLLYSHAVFVANIENIVDENIWKDEKQRDYIKTQISEIIENYTLEKSRFEIINGLLKEYKSENEDGKRVYYSKEAEQSFENDLKKKLVLFYKSNEIENKEQQETIFNELLPIFIQQLKDYEFIKIQRLDQKVLIFLKGKNETGQIFCTEEKGTAEEKEKKIKNRLKKLYHPSDIEKFKKKIIKDEFGNEKIVLGSPLTPSIKNPMAMRALHQLRKVLNALILEGQIDEKTIIHIEMARELNDANKRKGIQDYQNDNKKFREDAIKEIKKLYFEDCKKEVEPTEDDILRYQLWMEQNRSEIYEEGKNISICDIIGSNPAYDIEHTIPRSRSQDNSQMNKTLCSQRFNREVKKQSMPIELNNHLEILPRIAHWKEEADNLTREIEIISRSIKAAATKEIKDKKIRRRHYLTLKRDYLQGKYDRFIWEEPKVGFKNSQIPDTGIITKYAQAYLKSYFKKVESVKGGMVAEFRKIWGIQESFIDENGMKHYKVKDRSKHTHHTIDAITIACMTKEKYDVLAHAWTLEDQQNKKEARSIIEASKPWKTFKEDLLKIEEEILVSHYTPDNVKKQAKKIVRVRGKKQFVAEVERDVNGKAVPKKAASGKTIYKLDGEGKKLPRLQQGDTIRGSLHQDSIYGAIKNPLNTDEIKYVIRKDLESIKGSDVESIVDEVVKEKIKEAIANKVLLLSSNAQQKNKLVGTVWMNEEKRIAINKVRIYANSVKNPLHIKEHSLLSKSKHVHKQKVYGQNDENYAMAIYELDGKRDFELINIFNLAKLIKQGQGFYPLHKKKEIKGKIVFVPIEKRNKRDVVLKRGQQVVFYDKEVENPKDISEIVDFKGRIYIIEGLSIQRIVRPSGKVDEYGVIMLRYFKEARKADDIKQDNFKPDGVFKLGENKPTRKMNHNQFTAFVEGIDFKVLPSGKFEKI

SEQ ID NO: 214 - protein, 1459 aa, Flavobacterium columnare
MKFNLGLDIGTNSIGWALVNEDYENKKGKIIAAGSRIIPMTQDILDKFGSGAITETQTALRTDYRSKRKLIQRFLLRRERLHRVLNVLDFLPKHYAESIDFEKYFGKFLPNTEPKLAYNQNQFIFQNSFLEMLKEFQEKHPELLTNNKKIPYDWTIYYLRKKALNQRIEKEELAWLLLQFNQKRGYNQLRDEEEESVPNKQVEFYSLKIIDVVADQPKEGRDKRWYSINLENGWTYRRESKTPLFNWEGKTKDFIVTTDLNQDGSIKKDKEGKEKRSFRAPSEGDWTLLKKKTEKEIYESGKTLGTYIYDALLNTPDLKIKGDFIRTIDRSIYKEELQQIINKQKEYHLELNSSKLYKACLEELYPKNEIYKSALKNKDIAYLFINDILYYQRPLKAPKYNIGKCTYESRTFKKEDKKIREYIPAVAKSHPLFQEFRLWQWIKNLKIYEKLSSDNCTDFFLTNEQDFENLFEFLWNKKEIDHKGILEYLVKTKFPDLKPKQVKTKVKEYRWNYVYDHEKDESKTYPCGETYFLLKNKLDKIYNAQDDFLDKERLYNLWHIIYSVTDKKQYEKALAKFALKNHLDTKSFVNTFKRIPPFKNDYAIYSLKAIKKLLPLMRVGKYWNYDDIDPITKQKIQCIITGEENDTISTLVREKTNHFSNENDFKNLPLWLAGYIVYNSHNESSEIEKWKSPQDIDTFLKKFKQHALRNPIVEQVVTETLRVVRDIWSKKGQGKKDFFNEIHIELGKDLKNPVDKRRKLSSTNTKNESTNTRIKALLIELFTQGVENVKPNSPKHQEILKIFEEGALNSGIEIEEDIIKISNTDQPTKKQLELYILWLEHKYKSPYTGQSIPLSKLFTPNYEIEHIIPRSKYYDDNLSNKVICETEINRLKNNQLGYEFINNHEIREVTLEEGKTIRLLSPEQYWNFVTTYYAKNKAKRENLLLKELPVQMVEKQLNDTRYVSKYVMQLLSKIVRKEDGTDNGINSTNILSISGKMTRALKNDWDLNDVWNDLLLYRFERLNTITKTNLFTTYSEQKQKRMPIVPDQYAKGFHKKRLDHRHHALDAIVIACITRNHINYMNNQNIQGEKLKKNAIEKENYREILQKSRLDIRAQLCEKKYNDNDPTKYNWVFIKPWADFTENTKDILESIIPSFKQNLRIINKTVNYYEKYNENGKKVKVRQIKGDNWAIRKPLHKETISGKVHLSYKTPAKGKILTATRKVLDSSMDFKSIEKITDTGIQKILKNYLEYKKSPELAFSPEGIEELNATITKYNNGFHHKPIYKVRIYEEGVKFPLGNKGNKKSKYVEAEKGTNLFFAIYKDQENNRYFETIPFNDVLETLKKGMSAVPEKNQEENTLVFALSPQDLVFVPTLDEIENPDIVDFKNLTKDQTNRIYKMVSSSGKQCFFIKAEVATSIVNKMEFSTSNKMENSIEGIQIKSNCWKLKLDRLGTITRVIK

SEQ ID NO: 215 - protein, 1535 aa, Flavobacterium columnare
MTKILGLDLGTNSIGWAIRDTENEGINQILDKGARIFSEGVKSENGKEISRAAERTAYRSARKIKYRRKLRKYETLKVLSINGMCPLSVEEVEQWKKSGFKEYPLNPEFLDWLRTNEDKNINPYLFRDKASKQKVTLFELGRALYHIAQRRGFLSNRLDQSAEGVFEEHNPQIQNLIEDLDSSNTILNELKEYYINLGIIDETEKSGFKKDLDEGEKKLKSLYNSLVAITKKNANDIETCKQELIARLNKKEDLGKVKGKIKDISQAMLDRNFKTLGQYFFSLYNKERIRNQYTSREEHYLEEFIIICQTQGIEGINTNEKLPEKKFTGLAKDLYRAIFFQRPLKSQKGLIGKCSFEKNKSRCAVSHPDYEEFRMWSYLNTIKIGTQSEKTLRFLTLEEKLKLVPKFYRKSDFNFEVLAKELVEKGASFGYYKSSKKNEFFYWFNYKPTDSVSACVVSASLENAIGKDWKIKTFEYQTRNTEKNEVTKSVDYKDLWHLLSVATSDTYLYDFAIEKLKLEPKNAKAFSKTKLKKDFASLSLAAIAKILPYLKQGLLYSHAVFMANIENIVDADIWKDEEQQKFIQSKIVELVDNYIVEKSKLELINGLLKIYNTEDKEGRKVYYSKEAESLFEADLRKKLVPFYKANIIIEEHEQEIIFQDLFPILMDQLKKQEFIKIGRLDKQIEAFLEGENEEGQIFCNHTDKLKKLYHPSDIEVFKKKTIKDEWGNEKVVLGSPLTTSIKNPMAMRALHQLRKVLNTLIANDQIDEDTRIHIEMARELNDANKRKGIQDFQNENKKFREEAIKEIKKLYLEECHKDVNPTEDDILRYQLWLEQGKCEIYEEGNNISICDIIGSNPSYDIEHTIPRSISQDNSQMNKTLCSLKFNRSIKKQKMPVELSNYNDILPRIAHWKKEAEELTRQIETISRSIKSAATKVAKDKNIRKRHYLTLKRDYILGKYERFTWEEPKVGFKNSQIPDTGIITKYAQAYLKSYFKRVESVKGGAVAEFRKLWGIQESFIDENWWKHYKDKDRDKHTHHTIDAITIACMPKDKYDLLAHAWRLEDEQDKKAAKVLIEQAKPWKTFKEDIEKIETEILVSHFTPDNVKKQSKSIIKNRGKKVYVLKNELPVNFKNKIEGKDYFKLKFDSKILYKIPKKKEKQTDTFYEELPKNYLNGVEGKDYFKINTTGKTFYKIPIFNQGDTIRGSLHQETTYGAIKLPDIDIETKKPLHTDKGGFILKKDIKGNEIVFFVVRKEISKISENDVQNIVDNVVRKKIENAIANSLITFKIVKKKKVAVIKEGVTIWMREPNIEKGIEGIPIKKVRIITNSVKNPIEIKVHSPLSKSRHKHKQKVYGQNDENYAMALYELDGKREFELINNFNLAKLLKQSQSYYPLHKEKEIKGKKILVPIEKRNNKDVILKRGQQVVFYDKTVENPKDISEIIDFRERIYIIEGLTIQRQKDKKTSKVNEYGIIQLRHFKEARKSEEISKDNFKPDGEFKINENKPTRKMNHNQFTAFVEGIDFKVLPSGKFQKI

SEQ ID NO: 216 - protein, 1354 aa, Flavobacterium psychrophilum JIP02/86
MKKILGLDLGTNSIGWAFINEAENEIEVSSIVNTGVRIVPLTTDEESDFKKGNTISINADRTLKRGARRGLQRFKQRREALLETFNRIKFIATDFVYAETGAATTFSSYQLRAKSAVEAVTKEELVKVLLMLNKKRGYKSSRKAKTAEEGDAIDGMKIAKEIFENNLTPGQWVYNSLSKGGKFIPDFYHSDLQKELEKIVRFQNQFHSEQINDKLLADIQGKSRTQTSQHFSKTLNIPLAENKGTREETKLQHYQWRNEALANELDMKILAFIITEINNQINQSSGYLGAISDRSKELYFNQETVGQYQYKQLQENVHAKLKNQVFYRQDYLDEFEKIWETQAKFHSELNEKLKAEIRDITIFYQRKLKSQKHLVSFCEFEKGHKAIPKSSPLFQEFRIWQNLNNVVVKNETTKEVFELSEELKQLIAEELQFKESMTDVQMLTFCELKKGTHTVNFKKIEGNRTNTSIYKAFEKILEVEGYEIDFSKMKPLEIKETVAPIFETLNINTVILDFDPTIQGNDFDKQPYYQLWHLLYSAEDDDKLKETLKTKFGFKENHLPFILNINLQADYGSLSAKAIKKILPHLMDGHIYDKACLMVGYNHSSSLTTAQNNDRVLKDTLELLKKNSLRNPVVEKILNQMINVINAIMKDPAMGKPDEIRVELARELKANNEQRKKATSDINTATTEHERIRKLLHSEFNIPRVTRNDIIRYKLWLETGGISLYTGNPIKASDLFSKNYDIEHIIPKSRLFDDSFSNKTLCERQLNIDKSNKTAYSFLQEKLSENDFAAYENRVKDLFKTGKIKSYTKYKKLLMADNEIPEGFIDRQLRETQYIAKKAKEILLEVSRNVTATIGSVTDKLRQDWELVDVMKELNWEKYDKLGLTHIEEGKNGERLSKIKDWTKRNDHRHHAMDAITVAFTKPAYIQYLNNLNAKTQGENKANSIIGIENKHLYRDKNNKLRFISPMKNFREEAKKQLESILISYKAKNKVVTKNKNTTKKSGGTNQKIQLTPRGRLHKETVYGKLQQYATKEEKVNASFTEDYIQKVAKKEYREALLKRLEENDNDPKKAFTGKNALNKTPIYISLKDNIIVPEKVKTVWLETDYTIRKDITPDLKIDKVIDVGIKRILQNRLNEFNGDPKKAFVNLGESPIWLNKEKGIAIKRVTISGVSNAQALHTKKDHLGNEILDKNGNPIPVDFISTGNNHHVAIYRDEKGNLQEEVVSFYDAVIRRNLGLSVINKNHEKGWEFLFSMKQNEFFIFPSDGFNPHEIDLLNPNNYHLISPNIFRVQKISTKNYMFNHHLETKAVDGEMLKSKKELSKTSYHFIQTPTNLNGIIKVRINHLGKIVHLGEY

SEQ ID NO: 217 - protein, 1458 aa, Fluviicola taffensis
MTKTILGLDLGTNSIGWALINQDFDNKKGEILGMGSRIIPMTQDIKDEFGKGNSISQTAERTRLRGVRRLIHRTLLRRERLHRVLNIIGFLPEHYANQIDFEKRFGKFKPESEPKISFDGNDVFLFEKSYQEMLVDFKIHQPQLVSNGKKIPHDWTIYYLRKKALSKKIEKEELAWILLNFNQKRGYYQLRGEEEEETPNKLVEFHSLKIVEVNADEPQKGKPEIWYSLVLENGWVYRRASKTPLFDWKDKIREFIVTTEINNDGTVKTDKEGTEKRSFRAPKPEDWTLQKKKTEFELSKSGNEVGAFIYESILQKPNQKIRGKLISTIERKFYKEELKTILKTQLFFHKELKDEKLYNACIEELYKNNEAHRSLLSNKGFEHLFINDILFYQRPLRSKKSQISNCPLEKRTYKKEGIEITEGIKVISKSNPIYQEFRLWQWISNLSLYCIEPTETNVTSTFLNSIEDYENLFEFLNNRKEIEQKHLLKYLLENQGFKGKLLTNELEKFRWNFVADKKYPCNETGSLLHTRLSKVKNISPDFLTKEIEHQLWHIIYSVTDKIEYEQALKTFARKNNLDVDSFFEHFKKIPPFESTYGAYSEKAIKKLLPLIRLGKYWNWEAIDSISKDRISKILSGEYDENIKNRVREKAVHLTSENNFQGLQEWLAKYIVYDRHSEGNDLGKWTSVSDLETYLKEFKQHSLRNPIVEQVITETLRVVKDIWIKHGKGTENFFDEIHVELGREMKNNSEDRKRLTNTITENENTNLRIKALLMEMMNDNDVENVRPYSPSQQEILKIYEDGALNSNIELDDEIVKISKKAEPTKSELQRYKLWLEQKYRSPYTGQVIPLNKLFTSEYEIEHVVPQSRFFDDSFSNKVICESAVNKRKDNQLGLQFIKNHSGEKVELGFGKVVQVFTEEQYLDFVKEHYSKNRSKHNKLLLEEIPEKMIERQLNDTRYISKFVSSILSNIVRSEKDDDGLNSKNILPGNGKITTELKRDWGLNDVWNDLILPRFERMNTITNSDLFTTYNDKYQKHLPTVPFEYSKGFQKKRIDHRHHAMDALVIACATRDHLNLMNNQSAKSELKRYDLQNKLRKKEPYFNQKENKQKEAFKDFIKPWGTFTEDSKNALEKIIISFKQNLRVINKATNSYESYKDEDGNLRIGKDGKPEKGLIKQKGLNWAIRKPLHKDTVSGQINLSRIKLPNGKILTATRKNLDTSFDLKTIENSITDTGIQKILKNYLLSKESPELAFSPEGLEEMNNEIEKYNNGKFHHPINKARIYELGSKFNVGQTGNRRDKFVEAAKGTNLFFAIYQDENKNRSYETIPLNEVIEHQKWRASLPKEEQEKIPLVPVNKLKGTFIFSLSPNDLVYVPSNDELERSASIDFSKLKKEQINRLYKMVSSSGSQCFFVKSEVATSVVNKMEYSSLNKMEKSIDNLMVKEICIKLKIDRLGNISKA

SEQ ID NO: 218 - protein, 1646 aa, Francisella tularensis
MNIKILPIAIDLGAKNTGVFSAFYQKGTSLESLDNKNGKVYELSKDSYTLLMNNRTARRHQRRGIDRKQLVKRLFKLIWTKQLNLEWNKDTQQTISFLLNRRGFSFITDGYSPEYLNIAPEAVKAILMSILDDYNGEDDLDSYLQSATENDSKIDELYNKLLQKALEFKLRKLCIDIKEDKVTTKTLKELSNTEFKLLANYLVDYDRILRTQKFSYTDKQGNLRELNYYHHDKYNIQEFLKRNIIINDVILEKLTDDLDIWNLNFDKFDFEKNLEKLENQEDKDYLQTHLHHFVFAVNKIKSEMASGGRHRSQYFQEITNVLVENNHQEGYLKNFCENLHNKKYSNLSVKNLVNLIGNLSNLELKPLRKYFNDKIHAKADYWDEQKFAETYSDWILGEWRVGAKDKDKKDGAKYSYKNLCDELKQKVGINQDGIINQTKSDFVDFLLELDPCRTIPPYLDNNNRKPPKCQSLILNPKFLDNKYPNWQQYLQELKKLQTVQNYLGNFEIDLKDLKSSKEQPYFVKYKSLNQQIASGQRDYKDLDARVLQFIFDRVKASDELLLNEIYSHAKKLKQNTSSELEKLELCKKLDEVIANSQLSQILKSQHVNGIFEQGTFLHLVCKYYKQRQRARDSRLYIMPEYRYDKKLDKYNNTGRFDDDNQLLTYCNHKPRQKRYQLLNDLAGVLQVSPNFLKDKIGSDDDLFISKWLVEHIRGFKKACEDSLKIQKDNRGLLNHKINIARNTKGKCEKEIFNLICKIEGSEDKKGNYKHGLAYELGVLLFGEPNQASKLEFDRKIKKFNSIYSFAQIQQIAFAERKGNANTCAVCSADNAHRMQQIKVAKPVEGNKDNIILSAKAQRLPAIPTRIVDGAVKKIATILARNIVDDNWDNIKQALSNNQQLHVPIITESNAFEFEPALADIKGKSLKDKRKKALERIDPENVFKDKNNRIKEFAKGISAYSDANLANGDFDGAKEELDHIIPRSHKKYGTLNDEANLICVTREDNQNRGNKAVFLYDLKPNYKLKQFNTTDDLEIEKKIADTIWDASKQDFKFGNYRSFINLTPQEQIAFRHALFLADKNPIKKAVIRAIDNRNRTFVNGTQRYFAEVLANNIYLRAKKENLATNRITFDYFGIETTNSNGRGIADVRKLYEKVDSDIQAYAKGDKPQDSYSHLIDAMIAFCVAADEHKNEGSIGLKMGNQYGLFPTPDKYDENTGEIISWHNDDIFRKIKVSDNQFSDKKLVRKKATEGFNTHRQMTRDGIYGESYLPILIHKNLNEVRKGYNWENSEEIKIFKGKKYDIQQLNNLVYCLKFVDKPISIDIQITTLEELRNILETNNISTTAEYYYINLKTQKLHEYYIENYNTALGYKKYTKEMEFLRSLAYRTERVKIKSIDDVSMILAKDSNFKAGKIELPFKTEWQRLYLEWQNTTIKDNHEFLKSYFSVKNATKQHKKVRKDFSLPISTNEGKLLVKRKTWDNNFIYQILNDSDSRADGTKPFIPAFDISKNEIVETIIKSFTSKNIFWLPKNIELQKVDNKSIFAIDTSRWFEVETPKDLIEIGVSTIQYKIDNNSRPKVRVKLDYVMDDDSKINYFMNHSLLKSRYPDKVLEILKQSTIIEFESSGFNKTIKEMLGMTLAGIYNETSNN

SEQ ID NO: 219 - protein, 1629 aa, Francisella tularensis
MNFKILPIAIDLGVKNTGVFSAFYQKGTSLERLDNKNGKVYELSKDSYTLLMNNRTARRHQRRGIDRKQLVKRLFKLIWTEQLNLEWDKDTQQAISFLFNRRGFSFITDGYSPEYLNIVPEQVKAILMDIFDDYNGEDDLDSYLKLATEQESKISEIYNKLMQKILEFKLRKLCTDIKDDKVSTKTLKEITSYEFELLADYLANYSEILKTQKFSYTDKQGNLKELSYYHHDKYNIQEFLKRHATINIQILDTLLTDDLDIWNFNFEKFDFDKNEEKLQNQEDKDHIQAHLHHFVFAVNKIKSEMASGGRHRSQYFQEITNVLDENNHQEGYLKNFCENLHNKKYSNLSVKNLVNLIGNLSNLELKPLRKYFNDKIHAKADHWDEQKFTETYCHWILGEWRVGVKDQDKKDGAKYSYKDLCNELKQKVTKAGLVDFLLELDPCRTIPPYLDNNNRKPPKCQSLILNPKFLDNQYPNWQQYLQELKKLQSIQNYLESFETDLKVLKSSKDQPYFVEYRSSNQQIASGQRDYKDLDARILQFIFDRVKASDELLLNEIYFQAKKLKQKASSELEKLESSKKLDEVIANSQLSQILKSQHTNGIFEQGTFLHLVCKYYKQRQRARDSRLYIMPEYRYDKKLHKYNNTGRFDDDNQLLTYCNHKPRQKRYQLLNDLAGVLQVSPNFLKDKIGSDDDLFISKWLVEHIRGFKKACEDSLKIQKDNRGLLNHKINIARNTKGKCEKEIFNLICKIEGSEDKKGNYKHGLAYELGVLLFGEPNEASKPEFDRKIKKFNSIYSFAQIQQIAFAERKGNANTCAVCSADNAHRMQQIKITEPVEDNKDKIILSAKAQRLPAITTRIVDGAVKKMATILAKNIVDDNWQNIKQVLSAKHQLHIPIITESNAFEFEPALADVKGKSLKDRRKKALERISPENIFKDKNNRIKEFAKGISAYSGANLTDGDFDGAKEELDHIIPRSHKKYGTLNDEANLICVTRGDNKNKGNRIFCLRDLANNYKLKQFETTDDLEIEKKIADTIWDANKKDFKFGNYRSFINLTPQEQKAFRHALFLADENPIKQAVIRAINNRNRTFVNGTQRYFAEVLANNIYLRAKKENLNTDKISFDYFGIPTIGNGRGIAEIRQLYEKVDSDIQAYAKGDKPQASYSHLIDAMLAFCIAADEHRNDGSIGLEIDKNYSLYPLDKNTGEVFTKDIFSQIKITDNEFSDKKLVRKKATEGFNTHRQMTRDGIYAENYLPILIHKELDEVRKGYTWKNSEEIKIFKGKKYDIQQLNNLLYCLKFVDKPISIDIQISTLEELRNILTTNNIAATAEYYYINLKTQKLHEYYIENYNTALGYKKYTKEMEFLRSLAYRSERVKIKSIDDVKQVLDKDSNFIIGKITLPFKKEWQRLYREWQNITIKDDYEFLKSFFNVKSITKLHKKVRKDFSLPISTNEGKFLVKRKTWDNNFIYQILNDSDSRVDGTKPFIPAFDISKNEIVEAIIDSFTSKNIFWLPKNIELQKVDNKNIFAIDTSKWFEVETPSDLRDIGVATIQYKIDNNSRPKVRVKLDYVIDDDSKINYFTNHSLLKSRYPDKVLEILKQSTIIEFESSGFNKTIKEMLGMTLAGIYNETSNN

SEQ ID NO: 220 - protein, 1629 aa, Francisella novicida FTG
MNFKILPIAIDLGVKNTGVFSAFYQKGTSLERLDNKNGKVYELSKDSYTLLMNNRTARRHQRRGIDRKQLVKRLFKLIWTEQLNLEWDKDTQQAISFLFNRRGFSFITDGYSPEYLNIVPEQVKAILMDIFDDYNGEDDLDSYLKLATEQESKISEIYNKLMQKILEFKLMKLCTDIKDDKVSTKTLKEITSYEFELLADYLANYSESLKTQKFSYTDKQGNLKELSYYHHDKYNIQEFLKRHATINDRILDTLLTDDLDIWNFNFEKFDFDKNEEKLQNQEDKDHIQAHLHHFVFAVNKIKSEMASGGRHRSQYFQEITNVLDENNHQEGYLKNFCENLHNKKYSNLSVKNLVNLIGNLSNLELKPLRKYFNDKIHAKADHWDEQKFTETYCHWILGEWRVGVKDQDKKDGAKYSYKDLCNELKQKVTKAGLVDFLLELDPCRTIPPYLDNNNRKPPKCQSLILNPKFLDNQYPNWQQYLQELKKLQSIQNYLDSFETDLKVLKSSKDQPYFVEYKSSNQQIASGQRDYKDLDARILQFIFDRVKASDELLLNEIYFQAKKLKQKASSELEKLESSKKLDEVIANSQLSQILKSQHTNGIFEQGTFLHLVCKYYKQRQRARDSRLYIMPEYRYDKKLHKYNNTGRFDDDNQLLTYCNHKPRQKRYQLLNDLAGVLQVSPNFLKDKIGSDDDLFISKWLVEHIRGFKKACEDSLKIQKDNRGLLNHKINIARNTKGKCEKEIFNLICKIEGSEDKKGNYKHGLAYELGVLLFGEPNEASKPEFDRKIKKFNSIYSFAQIQQIAFAERKGNANTCAVCSADNAHRMQQIKITEPVEDNKDKIILSAKAQRLPAIPTRIVDGAVKKMATILAKNIVDDNWQNIKQVLSAKHQLHIPIITESNAFEFEPALADVKGKSLKDRRKKALERISPENIFKDKNNRIKEFAKGISAYSGANLTDGDFDGAKEELDHIIPRSHKKYGTLNDEANLICVTRGDNKNKGNRIFCLRDLADNYKLKQFETTDDLEIEKKIADTIWDANKKDFKFGNYRSFINLTPQEQKAFRHALFLADENPIKQAVIRAINNRNRTFVNGTQRYFAEVLANNIYLRAKKENLNTDKISFDYFGIPTIGNGRGIAEIRQLYEKVDSDIQAYAKGDKPQASYSHLIDAMLAFCIAADEHRNDGSIGLEIDKNYSLYPLDKNTGEVFTKDIFSQIKITDNEFSDKKLVRKKAIEGFNTHRQMTRDGIYAENYLPILIHKELNEVRKGYTWKNSEEIKIFKGKKYDIQQLNNLVYCLKFVDKPISIDIQISTLEELRNILTTNNIAATAEYYYINLKTQKLHEYYIENYNTALGYKKYSKEMEFLRSLAYRSERVKIKSIDDVKQVLDKDSNFIIGKITLPFKKEWQRLYREWQNTTIKDDYEFLKSFFNVKSITKLHKKVRKDFSLPISTNEGKFLVKRKTWDNNFIYQILNDSDSRVDGTKPFIPAFDISKNEIVEAIIDSFTSKNIFWLPKNIELQKVDNKNIFAIDTSKWFEVETPSDLRDIGVATIQYKIDNNSRPKVRVKLDYVIDDDSKINYFTNHSLLKSRYPDKVLEILKQSTTIEFESSGFNKTIKEMLGMTLAGIYNETSNN

SEQ ID NO: 221 - protein, 1629 aa, Francisella novicida GA99-3548
MNFKILPIAIDLGVKNTGVFSAFYQKGTSLERLDNKNGKVYELSKDSYTLLMNNRTARRHQRRGIDRKQLVKKLFKLIWTEQLNLEWDKDTQQAISFLFNRRGFSFITDGYSPEYLNIVPEQVKAILMDIFDDYNGEDDLDSYLKLATEQESKISEIYNKLMQKILEFKLRKLCTDIKDDKVSTKTLKEITSYEFELLADYLANYSESLKTQKFSYTDKQGNLKELSYYHHDKYNIQEFLKRHATINDEILDTLLTDDLDIWNFNFEKFDFDKNEEKLQNQEDKDHTQAHLHHFVFAVNKIKSEMASGGRHRGQYFQEITNVLDENNHQEGYLKNFCENLHNKKYSNLSVKNLVNLIGNLSNLELKPLRKYFNDKIHAKADHWDEQKFTETYCHWILGEWRVGLKDQDKKEGAKYSYKDLCNELKQKVTNAGLIDFLLELDPCRTIPPYLDNNNRKPPKCQSLILNPKFLDNQYPNWQQYLQELKKLQIIQDYLESFETDLKVLKSSKDQPYFVEYKSSNQQIASGQRDYKDLDARILQFIFDRVKASDELLLNEIYFQAKKLKQKASSELEKLESSKKLDEVIANSQLSKILKSQHTNGIFEQGTFLHLVCKYYKQRQRARDSRLYIMPEYRYDKKLDKYNNTGRFDDDNQLLTYCNHKPRQKRYQLLNDLAGVLQVSPNFLKDKIGSDDDLFISKWLVEHIRGFKKACEDSLKIQKDNRGLLNHKINIARNTKGKCEKEIFNLICKIEGSEDKKGNYKHGLAYELGVLLFGEPNEASKPEFDRKIKKFNSIYSFAQIQQIAFAERKGNANTCAVCSADNAHRMQQIKITEPVEDNKDKIILSAKAQRLPAIPTRIVDGAVKKMATILAKNIVDDNWQNIKQVLSAKHQLHIPIITESNAFEFEPALADVKGKSLKDRRKKALERISPENIFKDKNNRIKEFAKGISAYSGANLTDGDFDGAKEELDHIIPRSHKKYGTLNDEANLICVTRDDNKNKGNRIFCLHDLANNYKLKQFETTDDLEIEKKIADTIWDASKKDFKFGNYRSFINLTPQEQKAFRHALFLADENPIKQAVIRAINNRNRTFVNGTQRYFAEVLANNIYLRAKKENLNTDKISFDYFGIPTIGNGRGIAEIRQLYEKVDSDIQVYAKGDKPQASYSHLIDAMLAFCIAADEHRNDGSIGLEIDKNYSLYPLDKNTGEVFTKDIFSQIKITDNEFSDKKLVRKKATEGFNTHRQMTRDGIYAENYLPILIHKELDEVRKGYTWKNSEEIKIFKGKKYDIQQLNNLLYCLKFVDKPISIDIQISTLEELRNILTTNNIAATAEYYYINLKTQKLHEYYIENYNTALGYKKYTKEMEFLRSLAYRSERVKIKSIDDVKQVLDKDSNFIIGKITLPFKKEWQRLYREWQNTTIKDDYEFLKSFFNVKSITKLHKKVRKDFSLPISTNEGKFLVKRKTWDNNFIYQILNDSDSRVDGTKPFIPAFDISKNEIVEAIIDSFTSKNIFWLPKNIELQKVDNKNIFAIDTSKWFEVETPSDLRDIGVATIQYKIDNNSRPKVRVKLDYVIDDDSKINYFTNHSLLKSRYPDKVLEILKQSTIIEFESSGFNKTIKEMLGMTLAGIYNETSNN

SEQ ID NO: 222 - protein, 1629 aa, Francisella tularensis; identical to SEQ ID NO: 26

SEQ ID NO: 223 - protein, 1629 aa, Francisella novicida GA99-3549
MNVKILPIAIDLGVKNTGVFSAFYQKGTSLERLDNKNGKVYELSKDSYTLLMNNRTARRHQRRGIDRKQLVKRLFKLIWTEQLNLEWDKDTQQAISFLFNRRGFSFITDGYSPEYLNIVPEQVKAILMDIFDDYNGEDDLDSYLKLATEQESKISEIYNKLMQKILEFKLRKLCTDIKDDKVSTKTLKEITSYEFELLADYLANYSEILKTQKFSYTDKQGNLKELSYYHHDKYNIQEFLKRHATINDEILDTLLTDDLDIWNFNFEKFDFDKNEEKLQNQEDKDHTQAHLHHFVFAVNKIKSEMASGGRHRGQYFQEITNVLDENNHQEGYLKNFCENLHNKKYSNLSVKNLVNLIGNLSNLELKPLRKYFNDKIHAKADHWDEQKFTETYCHWILGEWRVGVKDQDKKDGAKYSYKDLCNELKQKVTKAGLVDFLLELDPCRTIPPYLDNNNRKPPKCQSLILNPKFLDNQYPNWQQYLQELKKLQSIQNYLESFETDLKVLKSSKDQPYFVEYKSSNQQIASGQRDYKDLDARILQFIFDRVKASDELLLNEIYFQAKKLKQKASSELEKLESSKKLDEVIANSQLSQILKSQHTNGIFEQGTFLHLVCKYYKQRQRARDSRLYIMPEYRYDKKLDKYNNTGRFDDDNQLLTYCNHKPRQKRYQLLNDLAGVLQVSPNFLKDKIGSDDDLFISKWLVEHIRGFKKACEDSLKIQKDNRGLLNHKINIARNTKGKCEKEIFNLICKIEGSEDKKGNYKHGLAYELGVLLFGEPNEASKPEFDRKIKKFNSIYSFAQIQQIAFAERKGNANTCAVCSADNAHRMQQIKITEPVEDNKDKIILSAKAQRLPAIPTRIVDGAVKKMATILAKNIVDDNWQNIKQVLSAKHQLHIPIITESNAFEFEPALADVKGKSIKDRRKKALERISPENIFKDKNNRIKEFAKGISAYSGDNLASGDFDGAKEELDHIIPRSHKKYGTLNDEANLICVTRDDNKNKGNRIFCLHDLANNYKLKQFETTDDLEIEKKIADTIWDASKKDFKFGNYRSFINLTPQEQKAFRHALFLADENPIKQAVIRAINNRNRTFVNGTQRYFAEVLANNIYLRAKKENLNTDKISFDYFGIPTIGNGRGIVEIRQLYEKVDSDIQAYAKGDKPQASYSHLIDAMLAFCIAADEHRNDGSIGLEIDKNYSLYPLDKNTGEVFTKDIFSQIKITNNEFSDKKLVRKKATEGFNTHRQMTRDGIYAENYLPILIHKELDEVRKGYTWGNSEELKIHKGKKYDIQQLNNLVYCLKFIDKSISIDIQISTLEELRNILTTNNIATTAEYYYINLKTQKLHEYYIENYNTALGYKKYTKEMEFLRSLAYRSERVKIKSIDDVKQVLDKDSNFIIGKITLPFKKEWQRLYREWQNTTIKDDYEFLKSFFNVKSITKLHKKVRKDFSLPISTNEGKFLVKRKTWDNNFIYQILNDSDSRVDGTKPFIPAFDISKNEIVEAIIDSFTSKNIFWLPKNIELQKVDNKNIFAIDTSKWFEVETPSDLRDIGVATIQYKIDNNSRPKVRVKLDYVIDDDSKINYFTNHSLLKSRYPDKVLEILKQSTIIEFESSGFNKTIKEMLGMTLAGIYNETSNN

SEQ ID NO: 224 - protein, 1323 aa, Fructobacillus fructosus KCTC 3544
MVYDVGLDIGTGSVGWVALDENGKLARAKGKNLVGVRLFDTAQTAADRRGFRTTRRRLSRRKWRLRLLDELFSAEINEIDSSFFQRLKYSYVHPKDEENKAHYYGGYLFPTEEETKKFHRSYPTIYHLRQELMAQPNKRFDIREIYLAIHHLVKYRGHFLSSQEKITIGSTYNPEDLANAIEVYADEKGLSWELNNPEQLTEIISGEAGYGLNKSMKADEALKLFEFDNNQDKVAIKTLLAGLTGNQIDFAKLFGKDISDKDEAKLWKLKLDDEALEEKSQTILSQLTDEEIELFHAVVQAYDGFVLIGLLNGADSVSAAMVQLYDQHREDRKLLKSLAQKAGLKHKRFSEIYEQLALATDEATIKNGISTARELVEESNLSKEVKEDTLRRLDENEFLPKQRTKANSVIPHQLHLAELQKILQNQGQYYPFLLDTFEKEDGQDNKIEELLRFRIPYYVGPLVTKKDVEHAGGDADNHWVERNEGFEKSRVTPWNFDKVFNRDKAARDFIERLTGNDTYLIGEKTLPQNSLRYQLFTVLNELNNVRVNGKKFDSKTKADLINDLFKARKTVSLSALKDYLKAQGKGDVTITGLADESKFNSSLSSYNDLKKTFDAEYLENEDNQETLEKIIEIQTVFEDSKIASRELSKLPLDDDQVKKLSQTHYTGWGRLSEKLLDSKIIDERGQKVSILDKLKSTSQNFMSIINNDKYGVQAWITEQNTGSSKLTFDEKVNELTTSPANKRGIKQSFAVLNDIKKAMKEEPRRVYLEFAREDQTSVRSVPRYNQLKEKYQSKSLSEEAKVLKKTLDGNKNKMSDDRYFLYFQQQGKDMYTGRPINFERLSQDYDIDHIIPQAFTKDDSLDNRVLVSRPENARKSDSFAYTDEVQKQDGSLWTSLLKSGFINRKKYERLTKAGKYLDGQKTGFIARQLVETRQIIKNVASLIEGEYENSKAVAIRSEITADMRLLVGIKKHREINSFHHAFDALLITAAGQYMQNRYPDRDSTNVYNEFDRYTNDYLKNLRQLSSRDEVRRLKSFGFVVGTMRKGNEDWSEENTSYLRKVMMFKNILTTKKTEKDRGPLNKETIFSPKSGKKLIPLNSKRSDTALYGGYSNVYSAYMTLVRANGKNLLIKIPISIANQIEVGNLKINDYIVNNPAIKKFEKILISKLPLGQLVNEDGNLIYLASNEYRHNAKQLWLSTTDADKIASISENSSDEELLEAYDILTSENVKNRFPFFKKDIDKLSQVRDEFLDSDKRIAVIQTILRGLQIDAAYQAPVKIISKKVSDWHKLQQSGGIKLSDNSEMIYQSATGIFETRVKISDLL

SEQ ID NO: 225 - protein, 1374 aa, Fusobacterium nucleatum subsp. vincentii ATCC 49256
MKKQKFSDYYLGFDIGTNSVGWCVTDLDYNVLRFNKKDMWGSRLFDEAKTAAERRVQRNSRRRLKRRKWRLNLLEEIFSDEIMKIDSNFFRRLKESSLWLEDKNSKEKFTLFNDDNYKDYDFYKQYPTIFHLRDELIKNPEKKDIRLIYLALHSIFKSRGHFLFEGQNLKEIKNFETLYNNLISFLEDNGINKSIDKDNIEKLEKIICDSGKGLKDKEKEFKGIFNSDKQLVAIFKLSVGSSVSLNDLFDTDEYKKEEVEKEKISFREQIYEDDKPIYYSILGEKIELLDIAKSFYDFMVLNNILSDSNYISEAKVKLYEEHKKDLKNLKYIIRKYNKENYDKLFKDKNENNYPAYIGLNKEKDKKEVVEKSRLKIDDLIKVIKGYLPKPERIEEKDKTIFNEILNKIELKTILPKQRISDNGTLPYQIHEVELEKILENQSKYYDFLNYEENGVSTKDKLLKTFKFRIPYYVGPLNSYHKDKGGNSWIVRKEEGKILPWNFEQKVDIEKSAEEFIKRMTNKCTYLNGEDVIPKDSFLYSEYIILNELNKVQVNDEFLNEENKRKIIDELFKENKKVSEKKFKEYLLVNQIANRTVELKGIKDSFNSNYVSYIKFKDIFGEKLNLDIYKEISEKSILWKCLYGDDKKIFEKKIKNEYGDILNKDEIKKINSFKFNTWGRLSEKLLTGIEFINLETGECYSSVMEALRRTNYNLMELLSSKFTLQESIDNENKEMNEVSYRDLIEESYVSPSLKRAILQTLKIYEEIKKITGRVPKKVFIEMARGGDESMKNKKIPARQEQLKKLYDSCGNDIANFSIDIKEMKNSLSSYDNNSLRQKKLYLYYLQFGKCMYTGREIDLDRLLQNNDTYDIDHIYPRSKVIKDDSFDNLVLVLKNENAEKSNEYPVKKEIQEKMKSFWRFLKEKNFISDEKYKRLTGKDDFELRGFMARQLVNVRQTTKEVGKILQQIEPEIKIVYSKAEIASSFREMFDFIKVRELNDTHHAKDAYLNIVAGNVYNTKFTEKPYRYLQEIKENYDVKKIYNYDIKNAWDKENSLEIVKKNMEKNTVNITRFIKEEKGELFNLNPIKKGETSNEIISIKPKLYDGKDNKLNEKYGYYTSLKAAYFIYVEHEKKNKKVKTFERITRIDSTLIKNEKNLIKYLVSQKKLLNPKIIKKIYKEQTLIIDSYPYTFTGVDSNKKVELKNKKQLYLEKKYEQILKNALKFVEDNQGETEENYKFIYLKKRNNNEKNETIDAVKERYNIEFNEMYDKFLEKLSSKDYKNYINNKLYTNFLNSKEKFKKLKLWEKSLILREFLKIFNKNTYGKYEIKDSQTKEKLFSFPEDTGRIRLGQSSLGNNKELLEESVTGLFVKKIKL

SEQ ID NO: 226 - protein, 1367 aa, Fusobacterium sp. 1_1_41FAA
MKKQQFSDYYLGFDIGTNSVGWCVTDFNYNVLRFNKKDMWGSRLFDEAKTAAERRVQRNSRRRLKRRKWRLNLLEEIFSDEILKIDSNFFRRLKESSLWLEDKSSKEKFTLFNDDNYKDYDFYKQYPTIFHLRNELIKNPEKKDIRLVYLALHSIFKSRGHFLFEGQNLKDIKNFETLYNNLMAFLEDNDIYKNIDSSYIGNLENIICDSKKGLKDKEKEFKEIFNSDKQLVGFFKLSVGSSVSLNDLFDTDEYKKGEVEKEKISFREQIYEDDKPIYYSILGEKIEFLDIAKSFYDFMVLNNILADSQYISEAKVKLYDEHKRDLKNLKYIIRKYNKENYDKLFKDKNESNYSAYIGLNKEKGKKEVIEKSRLKIDDFAKIIKGYLPKAEKIDEKDRSIFNEILDKIELKTILPKQRISDNGTLPYQIHEAELEKILENQAKYYDFLNHEENGISTKDKLLMTFKFRIPYYVGPLNSYHKNKGGNSWIVRKEEGKILPWNFEQKVDIEKSAEEFIKRMTNKCTYLNGEDVIPKDSFLYSEYIILNELNKVQVNDEFLNKEIKKKIIEDLFKKSKKISEKNFREYLLVNQITNKTVELKGVKDAFNSNYVSYIKFKDIFGDKLNLDIYKEISEKSILWKCLYGDDKKIFEKKIKSVYGDILTKDEIKKINSFKFNTWGRLSEKLLTEIEFIDLETGECYSSVMDALRRTNYNLMELLSSKFTLQENIDNENKEVSEFSYRDLVEESYVSPSLKRAILQTLKIYEEIRKITGRIPKKVFIEMARGGDETMKNKKIPARQEQLKKLYDSCGKDISNFSIDIKEMKNSLNSYDNNSLRQKKLYLYYLQFGKCMYTGKEIDLNRLLQNNDTYDIDHIYPRSKVIKDDSFDNLVLVLKNENAEKSNEYPLKKEIQEKMKSFWKFLKEKNFISDEKYKRLTGKDEFELRGFMARQLVNVRQTTKEAGKILQQIEPEIKIVYSKAEIASSFREMFDFIKVRELNDTHHAKDAYLNIVAGNVYNTKFTEKPYRYLQEIKENYDVKKIYNYDIKNAWDKEKSLEIVKKNMEKNTVNITRFIKEEKGQLFDLNPIRKGETSNEIIAIKPKFYEGSTEKLNEKYGYYKSLNPAYFIYVEHKEKNKIIRSFERVNLVDVNKIKDEKSLIKYLIENKGLIEPKVIKKVYKRQVILINNFPYSIVALDSNKLMDFENLKPLFLERKYEKILKNAIKFLEDNQGKTEEYYKFLYLKKKDRNEKNETIDSVKERYNIEFNEMYDKFLEKLDSKDYKNYINNKKYSELVNVKEKFIKLNLFDKAFTLKSFLDLFNRKTMADFSKVGLTKYLGKIQKISSNVLSKNELHLLEESVTGLFVKKIKL

SEQ ID NO: 227 - protein, 1367 aa, Fusobacterium sp. 3_1_27
MKKQKFSDYYLGFDIGTNSVGWCVTDLDYNVLRFNKKDMWGSRLFDEAKTAAERRVQRNSRRRLKRRKWRLNLLEEIFSDEIMKIDSNFFRRLKESSLWLEDKNSKEKFTLFNDDNYKDYDFYKQYPTIFHLRDELIKNPEKKDIRLIYLALHSIFKSRGHFLFEGQNLKEIKNFETLYNNLISFLEDNGINKSIDKDNIKKLEKIICDSGKGLKDKEKEFKEIFNSDKQLVAIFKLSVGSSVSLNDLFDTDEYKKEEVEKEKISFREQIYEDDKPIYYSILGEKIELLDIAKSFYDFMVLNNILSDSNYISEAKVKLYEEHKKDLKNLKYIIRKYNKENYDKLFKDKNENNYPAYIGLNKEKGKKEVVEKSGLKIDDLIKVIKGYLPKPERIEEKDKIIFNEILNKIELKTILPKQRISDNGTLPYQIHEVELEKILENQSKYYDFLNYEENGVSTKDKLLKTFKFRIPYYVGPLNSYHKDKGGNSWIVRKEEGKILPWNFEQKVDIEKSAEEFIKRMTNKCTYLNGEDVIPKDSFLYSEYIILNELNKVQVNDEFLNEENKRKIIDELFKENKKVSEKKFKEYLLVNQIANRTVELKGIKDSFNSNYVSYIKFKDIFGEKLNLDIYKEISEKSILWKCLYGDDKKIFEKKIKNEYGDILNKDEIKKINSFKFNTWGRLSEKLLTGIEFINLETGECYSSVMEALRRTNYNLMELLSSKFTLQESIDNGNKEMNEVSYRDLIEESYVSPSLKRAILQTLKIYEEIKKITGRVPKKVFIEMARGGDETMKNKKIPARQEQLKKLYDSCGNDIANFSIDIKKMKSSLSSYDNNSLRQKKLYLYYLQFGKCMYTGREIDLDRLLQNNDTYDIDHIYPRSKVIKDDSFDNLVLVLKNENAEKSNEYPVKKEIQEKMKSFWRFLKEKNFISDEKYKRLTGKDDFELRGFMARQLVNVRQTTKEVGKILQQIEPEIKIVYSKAEIASSFREMFDFIKVRELNDTHHAKDAYLNIVAGNVYNTKFTEKPYRYLQEIKENYDVKKIYNYDIKNAWDKENSLEIVKKNMKKNTVNITRFIKEEKGQLFDLNPIKKGETSNEIISIKPKLYNGKEEKLNEKYGYYKSLNPAYFLYVEHKEKNKRIKSFERVNLVDVNNIKDEKSLVKYLIENKKLVEPRLIKKVYKRQVILINDYPYSIVALDSNKLMDFENLKPLFLENKYEKILKNVIKFLEDNQGKSEENYKFIYLKKKDRYEKNETLESVKDRYNLEFNEMYDKFLEKLDSKDYKNYINNKKYKNLLDVKEKFIKLNLFDKAFTLKSFLDLFNRKTMADFSKVGLTKYLGKIQKISSNVLSKNELYLLEESVTGLFVKKIKL

SEQ ID NO: 228 - protein, 1367 aa, Fusobacterium sp. 3_1_36A2
MKKQKFSDYYLGFDIGTNSVGWCVTDLDYNVLRFNKKDMWGSRLFDEAKTAAERRVQRNSRRRLKRRKWRLNLLEEIFSDEIMKIDSNFFRRLKESSLWLEDKNSKEKFTLFNDDNYKDYDFYKQYPTIFHLRDELIKNPEKKDIRLIYLALHSIFKSRGHFLFEGQNLKEIKNFETLYNNLISFLEDNGINKSIDKDNIKKLEKIICDSGKGLKDKEKEFKEIFNSDKQLVAIFKLSVGSSVSLNDLFDTDEYKKEEVEKEKISFREQIYEDDKPIYYSILGEKIELLDIAKSFYDFMVLNNILSDSNYISEAKVKLYEEHKKDLKNLKYIIRKYNKENYDKLFKDKNENNYPAYIGLNKEKGKKEVVEKSGLKIDDLIKVIKGYLPKPERIEEKDKTIFNEILNKIELKTILPKQRISDNGTLPYQIHEVELEKILENQSKYYDFLNYEENGVSTKDKLLKTFKFRIPYYVGPLNSYHKDKGGNSWIVRKEEGKILPWNFEQKVDIEKSAEEFIKRMTNKCTYLNGEDVIPKDSFLYSEYIILNELNKVQVNDEFLNEENKRKIIDELFKENKKVSEKKFKEYLLVNQIANRTVELKGIKDSFNSNYVSYIKFKDIFGEKLNLDIYKEISEKSILWKCLYGDDKKIFEKKIKNEYGDILNKDEIKKINSFKFNTWGRLSEKLLTGIEFINLETGECYSSVMEALRRTNYNLMELLSSKFTLQESIDNGNKEMNEVSYRDLIEESYVSPSLKRAILQTLKIYEEIKKITGRVPKKVFIEMARGGDETMKNKKIPARQEQLKKLYDSCGNDIANFSIDIKKMKSSLSSYDNNSLRQKKLYLYYLQFGKCMYTGREIDLDRLLQNNDTYDIDHIYPRSKVIKDDSFDNLVLVLKNENAEKSNEYPVKKEIQEKMKSFWRFLKEKNFISDEKYKRLTGKDDFELRGFMARQLVNVRQTTKEVGKILQQIEPEIKIVYSKAEIASSFREMFDFIKVRELNDTHHAKDAYLNIVAGNVYNTKFTEKPYRYLQEIKENYDVKKIYNYDIKNAWDKENSLEIVKKNMKKNTVNITRFIKEEKGQLFDLNPIKKGETSNEIISIKPKLYNGKEEKLNEKYGYYKSLNPAYFLYVEHKEKNKRIKSFERVNLVDVNNIKDEKSLVKYLIENKKLVEPRLIKKVYKRQVILINDYPYSIVALDSNKLMDFENLKPLFLENKYEKILKNVIKFLEDNQGKSEENYKFIYLKKKDRYEKNETLESVKDRYNLEFNEMYDKFLEKLDSKDYKNYINNKKYKNLLDVKEKFIKLNLFDKAFTLKSFLDLFNRKTMADFSKVGLTKYLGKIQKISSNVLSKNELYLLEESVTGLFVKKIKL

SEQ ID NO: 229 - protein, 1391 aa, Galbibacter sp. ck-I2-15
MKTILGLDLGTNSIGWALVKEAENENEVSDIIKLGVRVNPLTVDELTNFEGGKAYSNNAERTLKRGARRNLQRYKLRRENLIEILLKNGLINKDTALTEVGKETTHQTLKLRSKSANEKVSLEDLAKILLSINKKRGYKSSRKVNAEDDGVAIDGMEVAKLLYDENMTPGEYVLRLLESGKKHLPDFYRSDLQEEFNLVWKKQSEFYPLILTKELFFELHGKNKSQTWAICKEPLGIVGVKLKGSAKEQKFARYRLRKEALTQQIELEHLAIVLQDINNDSNKSSGYLGAISDRSKELFFNKETVGQYQYKQLQKDPNTSLKNQVFYRQDYLDEFEVIWRNQAKFYPQLTNELKQEIRDVVIFYQRKLKSQKNLISFCQFESTQQNYVEKETGKTKIRTIGRRVIPRSSPLFQEFKIWQSLNNLKFVNSESNQIIQFIELEDDVKKVVFDELNLRGDLKPNQVLKILSKYMKIGKLTQWKCNLEEIEGNRTNSALYNVFQMIAEEEGYGFNWGKKSALEIKSELKAIFSSIGINDSILDFDFSKKLDQQLSYQLWHLLYSAEEGNSKITEEDKFTYGNTGVALKKKLHLKFGFKPEYSTLISNLRFTSDYGNLSSKAISKILPFLRDGSDYSKACQYAGYNHSNSLSADELDNRELKPKLELLKKNSLRNPVVEKILNQMVNVVNQVIDNYGKPDEVRIELARELKKSAKERSQMTKNISDATRRNAEIKKYLSKEFGIPNPTKGDVIRYRLWEELASNGYKDLFRDKYIPKEKLFSNEIDIEHIIPKALLFDDSFSNKTLAFKVDNLKKADRTAFDFMSTDFSKDVDSYIGRIETLHKDGKISSSKYKKLMIPKSKLVDGFIERDLRNTQYIAKQARKMLLEVFKTVVPTTGKITDKLREDWDLINVMKELNFPKYKALGLTKKIERFDVGSEKIKSINVIEGWSKRNDHRHHAMDALAVAFTTHNHIQYLNYLNARKDIHHEMHGTIKSIENQIIGKDVMGKRRFIPPISDLRMKAKLQIESILISFKNKNKVVTWSVNKTKLKGKDNYNKRRQLTPRGQLHKETVYGKIKLIDPKPLKLNNKFTLVRASMIVDKVHREIVLQHLSKYDNNSEVAFDSKTIKIDPILIEGIGLKEVVCYEDVFKIRKKISGDNFKNEKHLEKVIDEKVKQILKDRVIKFQGNFKEAFSNLEENPIWLNKSKGIAVKSVAIKGVNNAESLHEGKDHFGDQILDKNKKQIPVDFVSTGNNHHVGIYEDKDGNLQERVVSFFEAVTRVNEGLPIIDKTYNSDIGWKFKFTMKQNEMFVFPSDDFDPNEFDLTDGKNAAKISPNLYRVQKIATKNYMFRHHLETVVTNDLEFTYKSIRSTGWLRNLVKVRINHLGEIVYVGEY

SEQ ID NO: 230 - protein, 1025 aa, gamma proteobacterium HdN1
MGGYMPQLMRYRLALDIGSTSIGWAMIRLSMQNEPIAIIRMGVRIFSDGRNPKDGSSLAVTRRVARQMRRRRDRLLKRKTRLLNALVQKKFFPEDADARKALVVLNPYELRKEGLYRQLSGPEFGRALFHISQRRGFLSNRKTDKKDNDSSVLKKAIVDLRQQLEVENCQTIGEWLFKQQQSGKSVRARLRGKTQKDKAYDFYIDRAMIAHEFDTLWVSQAKYDPLLFNEDARAILRDILLYQRPLKPVKPGRCTLIPDESRAPLALPLTQQARIYQELNHLRITTPALGAQALTVAQRNTIAALLEKSDVTFVKIAKALGLTSTTEFNLQDIKRDRLKGNATAIILARNQYFGRRWHDFNADLQNLIVDKLVNEGSETALIEWLKANTDVDESAAERVSGVTLPEGYGSLSVAALRRLLPALKEDVVVYSEAVKRAGFDSHSALSLIEQTGELYQELPYYGEVLQRHVGFGSGDPNDSPERRFGKIANPTVHIGLNELRKIINALIKRYGNPAEVVVELARDLKLSREKRKEIQEEQKQRQDRNEKRIKDACEILGIDPLVIDRGKRREISQKMQLWDELNPKDAANRRCPYTGDQISIEKLLSAEVEIEHILPFSKTLDDSLNNKTVAMRRANRDKGNRTPYEAFGESLNPDYDYDAILQRASLMPREKRKRFASDGYQQWLRDDKDFLSRALNDTAYLSRIAKEYLTLICPPNSVRAIPGRMTAQLRAMFGLNRLLSEGGIKNREDHRHHAIDAAVIGVTDQGLLQKFSRASARTRELQLSRLVDDMPLPWDTYREHVTRALEHLVVSHKPDHGYQGKMHEDTAWGLRDNGQVTRRVRSEDGGPRQRLLENKNVVKINSTRDFSRHGIDEQGQVNAYKGYVGGSNYCIEIWIDEKGKWNSDVVSTFQAYQIVRELGEKAAWQKLRNPLLSLSAKPLVMRLIIDDVVKMQIAGQNKIMRVVKIAQNGQIFFAEHNEANVDARDKDKNNPFKYISKTAGSLQKAGGIHMAISPIGDARPVRYGR

SEQ ID NO: 231 - protein, 1397 aa, gamma proteobacterium HTCC5015
MTKNYISPIAIDLGAKFTGVALYQYLEGADCTQEVAKGLLVDDRGNVTWSQEGRRGKRHQVRGYKRRKMAKRLLWLILDSEYGIKREEVTEPLLKFINGLLNRRGYTYISEEVDEESMNVSPLPFSEMMPDYFNSSAPLLEQLAKLLSDKNKLVRFRAEGKIPSNKNEFKKLLDTALDGKYKDEKKELSEAWGNILIASENVLKSTVDGHKSRSEYLANIKEDIKSNEELEKQISSKEIDGFYNLVGHLSNFQLRLLRKYFNDPNMSGVSYWDEKRLEKYFYQWVQGWHTKGGTDEAEKKNIILKTKGAPLLKTLKSLSADLTIPPYEDQNNRRPPKCQSVLLSDEKLTMHYPKWKEWVGQLVKQNDNAYLNENVTLANALHRIVERSRSIDPYQLRLLISITDAEKRNDLAGYKRLKLSLGSEVDEFLLLVKNIVDETKEAREGLWFETENKLFFKCGKTPPRKEKLKSTLLSAVLGKNLSDDEQSSFIEEFWKSGTPKIERRNVRGWCRLASQVQKTYGVYLKEYGLQQLHKLEAGKKLDDKPLALLYKNSGLIASKIGEALNIEPDEVSRFASPHSLAQIFNIIEGDVAGFNKTCRACTYENIWRMQEEKVESLLTNQLLSEIHGERKVPLKSAMCTRLSADSTRPFDGQMASIIEHIARKIAQHKIAQINDVPKEFSIDIPIIIESNQFSFTAELEEIKRGRGSAKAKKAKELGEKSKAGWVSKTERIKTSSEGICPYTGAPLGGSGEIDHIIPRSLTGRTKKTVFNSEANLIYCSSKGNHDKGNRVYVIEQLNDKYLKKQFSTSDVNLIKKKIKTTIQRFTEGGEKLRSFSELSREDQKAFRHALFVPELKSEVTSLLAVKNITRVNGTQAWLAKKIASLLAEHLDKQGRDYTLSAHQIDPWSVSKQRKMLASAEPIWAKKDPQPAASHVVDAVCTFLEALEQPHTASRLKTISSTSFEKTGWRSALIPDLIKVDALDRRPKYRRYNIGSTSLFKDGIYAERFLPILIDENGLMAGYDIDNSLKAKGADVVFESLSPFLLFKGEEVGAQSLSDWQERIDGRYLYMSIDKVKAFDYLQEKVGEKDIAAELLNSIHFTQRKTELRAKFSDDSGKKMKTLDAIRKSLKLTVTVNEIGKRKEKCGFSGTIGIPAKSAWENLLDEPLLETYWGTKMPPQEIWEKVYRKHFPRNIPNQAHRKVRKDFSLPVVDSVSGGFRVKRKTPNGYNYQLLAIDGYSAVGFKKEGDNVDFKSPALVPQIAESKSVTPISSELVHLDKNEIVYFDEWRKIDISDSDLKQFVSSLELAPGSQNRFYIRFTVDEDQFERHFKSALRVNGIQDLDTVNKTFDWNREIPSLLIPPRSNLFLLETGQKITFEYIANGANAEVKKAYSLRRA

SEQ ID NO: 232 - protein, 1186 aa, Gardnerella vaginalis 1500E
MEGNISYAIGIDVGLNSVGLAAIRLDNNGEPIRILKAMSVIHDAGIDPNGAKESDTRKAISGVARRVRRLYRQRRRRLQKLDFLLHSLGFPVVENKDLDFSDSFIPWIFRAKLADEYIADEKQRKQMLSVAIRHIARHRGWRNPYQSIKSMTQETEYSEFYNELLKNIEKFAPGVGCEGSTPAQLVRDYLLLQQGKASRRLRITTDEKRKNHPNSLNPILPRKLMQSDNMLEILNIFNVQHIDDKYVREQIINAVFYAKSPRGSAENRVGKDAITGKGKRALKASLAFQKYRIISTISNLRIRENSKERCLTIEEKQSVYKLLTTSTDESSKEKSAEAPLYTWIDVADCLGIERYKLRGVGSQIGDGESVGNRPPMLNSELAIIYANNKSLGKSLLTWWLDANRTQEDKEALIEILSNTVDIEAIHDNPEYQDKYGSAIAFIDSMDETEIAALENISLPDGRAAYSLETLDKLNKQMLETDDDLFEARKKLFNLPNNWRPSEAPIAEPTGNPSVDRVLKIVHRFLISAKNRWGNPERINIEHVRSGFKSKKMANSYKELLDKRTKGKENLKAMMRNSLHLGMSDSISDADIRRYEAVQRQNGQCLYCGSEITYHTCELDHIVPRKGPGSTNTRENLVATCSLCNAQKCNTPFSTWCEQSTYCKNHDISVDSAINRVRAFIFPPNSYDKRGANQFKKEVIARLKQKVGDEAFDNRSIESVAWMANELHRRIDWYYNSQNYQTNNGISDITNKAQTNVGVYAGSLTAIARRMSGIDGKLEFFDGRRKTRFDRRHHAVDASVIAMMTPGIAQILAIKCNLRETQLLQGNKVVPGGIDWKEYPTANDQGYQQYANWSVRMNALLKLLNEEMRADRIAVVNSIRLRYNNSSVHQYKVNALLKLHVGDEIDSGTIRRSSTPALYCALTRNPDYDVNNGLPENPNRAILLHDKKLNADDSITFFKAQAVQLFVREGSAEIGSSTHHLRIYEYFKKLKSGKIKKSYGMIRVFQNDLHRHIHEDLFSCDLPEQSISMRYADTEVAHAVQTGNSNYLGYLVPGDEIIVDFSHVKLSGNIGTFVEFLNKIGANCAAYNHWVVVGTDTEKVLILKPSMISSEGIDKLYSNCKRNNFDYSSYEKSINEILVGKGWRVSVNVLAKYNAETIRRNALGEVRWTSRSHLPISWSWNTGENRE

SEQ ID NO: 233 - protein, 1186 aa, Gardnerella vaginalis 284V
MEGNISYAIGIDVGLNSVGLAAIRLDDYGEPIRILKAMSVIHDAGIDPNGAKESDTRKAISGVARRVRRLYRQRRRRLQKLDFLLQSLGWPVVENKDLDFSDSFIPWIFRAKLADEYIADEEQRKQMLSVAIRHIARHRGWRNPYQSIKSMMQETEYSEFYNELLKNIEKLAPGVGCEGSTPAQLVRDYLLSQQGKASRRLRITTGGRRKNHPHSLDPVLPRKLMQSDNMLEILNIFNVQHIDDKYVREQIINAVFYAESPRGSAENRVGKDAITGKGKRALKASLAFQKYRIISTISNLRIRENSKERCLTIEEKQNVYKLLTTSIDKSSKRKSAEAPLYTWIDVADCLGIERYKLRGVGSQIGDGESVGNRPPMLNSELAILYANNKSLGQSLITWWLASNRTQEDKEALIEILSNTVDIEAIHDNPEYQDKYGSAIAFIDSMNETEIAALENISLPDGRAAYSLETLDELNKQMLETDDDLFEARKKLFNLPNNWRPAEAPIAEPTGNPSVDRVLKIVHRFLISAKNRWGNPERINIEHVRSGFQSKKMANSYKELLDKRTEGKENLKAMMRNSLHLGTSDSISDADIRRYEAVQRQNGQCLYCGSEITYHTCELDHIVPRKGPGSTNTRENLVATCSSCNAQKCNTPFATWCEQSTYCKNHDISADSAINRVRAFIFPPNSYDKRGANQFKKEVIARLKQKVGDEAFDNRSIESVAWMANELHRRIDWYYNSQNYQTNNGISDISNKAQTNVGVYAGSLTAIARRMSGIDGKLEFFDGRRKTRFDRRHHAVDASVIAMMTPGIAQILAIKCNLRETQLLQGNKVVPGGIDWKEYPTANDQGYQQYANWSVRMNALLKLLNEEMRADRIAVVNSIRLRYSNSSVHQYEVNALLKLHVGDEIDSETIRRSSTPALYCALTRNPDYDVNNGFPENPGRTILLHNKKLNADDSITFFKAQAVQLFVREGSAKIGNSIHHLRIYEYFEKLKSGKIKKSYGMIRVFQNDLHRHIHEDLFSCDLPEQSISMRYADTKVAHAVQTGNANYLGYLVPGDEIIVDFSHITLSENIGKFVEFLNKIGADCTAYRHWVVVGTDTEKVLILKPSMISSEGIDKLYSNCERNNFDYSSYEKSINEILAGKGWRVSVNVLAQYKAATIRRNALGEVRWASRSHLPISWSWDTGENRE

SEQ ID NO: 234 - protein, 1186 aa, Gardnerella vaginalis 5-1
MEGNISYAIGIDVGLNSVGLAAIRLDNNGEPIRILKAMSVIHDAGIDPNGAKESDTRKAISGVARRVRRLYRQRRRRLQKLDFLLHSLGFPVVENKDLDFSDSFTPWIFRAKLADEYIADEKQRKQMLSVAIRHIARHRGWRNPYQSIKSMTQETEYSEFYNELLKNIEKFAPGVSCEGSTPAQLVRDYLLSQQGKASRRLRITTDDRRKNHPNSLDPVLPRKLMQSDNMLEILNIFNVQHIDNKYVREQIINAVFYAKSPRGSAENRVGKDAITGKGKRALKASLAFQKYRIISTISNLRIRENSKERCLTIEEKQSVYKLLTTSTDEYSKEKSAEAPLYTWIDVADCLGIERYKLRGVGSQIEDGESVGNRPPMLNSELAILYANAKSLKQSLITWWLAANRTQEDKEAFIEILSNTVDIEAIHDNPEYQDKYGSVIAFIDSMDETEIAALENISLPNGRAAYSLETLDKLNKQMLETDDDLFEARKKLFNLPNNWRPSEAPIAEPTGNPSVDRVLKIVHRFLISAKNRWGNPERINIEHVRSGFQSKKMANSYKKLLDKRTEGKENLKAMMRNSLHLGTSDSISDADIRRYEAVQRQNGQCLYCGSEITYHTCELDHIVPRKGPGSTNTRENLVATCSSCNAQKCNTPFATWCEESTYCKNHDISVDSAINRVRAFIFPPNSYDKRGASQFKKEVIARLKQKVGDEAFDNRSIESVAWMANELHRRIDWYYNSQNYQTNNGISDITNKAQTNVGVYAGSLTAIARRMSGIDGKLEFFDGRRKTRFDRRHHAVDASVIAMMTPGIAQILAIKCNLRETQLLQGNKVVPGGIDWKEYPTANDQGYQQYANWSVRMNALLELLNEEMRADRIAVVNSIRLRYSNSSVHKDDVHALLKLHVGDEIDSETIRRASTPALYCALTRNPDYDVNNGLPENTDRTILLHDKKLNADDSITFFKSKAAQLFVREGSVEIGNSIHHLRIYEYFEKLKSGKVKKSYGMIRVFQDDLHRYIHEDLFSCDLPEQSISMRYADTKVAHAVQTGNANYLGYLVPGDEIIVDFSHVKLSGYIGEFVEFLNKIGANCAAYKHWVVAGTDDKTTLILKPSMISSEGIDKLYSNCERNNFDYASYEKSIDKILVDKGWRVSVNVLDQYKAATIRRNALGEPRWASRSHLPISWSWDTGENRE

SEQ ID NO: 235 - protein, 1392 aa, Gemella haemolysans ATCC 10379
MANKTWYLGLDIGSASVGWAATDTGYKIIRKNKKRLWGVRLFEEAKTAEDRRGYRSSRRRLARRKWRLNLLEELFTSEVKKVDENFFLRLKESQYHYEDKTHKVPYAIFNDKDYTDKDYYKDYPTIYHLRSKLMTEENPDIRKVFLAIHHIIKNRGHFLLQGQSFKDGNLNNLIKELLELDILHVGFEVTEEVVDKIADISLEKKTSKDKLNDIKELYPKEKQLLEVFRLIFGGKTSLDKLFAIDEYKELDAAIKSVSFKEKIYEEVRHDYEQVLSNYIELLDLAKLVYDSIILSDIKKEGKTLSESKVELFEKHRDDLLKLKNLVKNDSKLSEDKKVELYALIFKEDKDKGTNYVNYIRKSEEGKGCNYEDFKKFLVKELAKLEESSVKTEIIKDLELEQFLPLQRTKDNSVVPYQIHKEELVKILDNAARYHSFLNEKDESGYNVREKVIQLLEFRIPYYVGPLNSSKKAKEGGFAWSVRNTGYENTPVTPWNYSKVIDESASAEKFITNLTNKCTYLKGEDVLPKSSLLYSEFALLNELNALKYDGNRISLEARNTIIEKLFKQQGKKVTKTSIKNLLKAEGYIDGKGEITGIDITVKNDLKSYRDFKKILGNKFNSEHVENIILWITLYGESRKLIKAKIESVYGEVYSKDEITKMSRLVYKDWGRFSRKLLTELVSKKLYNEETGECLNIIGAMRQNNILFMELLADRFDYSKQIVEFNKELQEDVTEIAPEILDDLYVSPAVKRSIWQTVRIVEELKKIIGCAPAKIFVETTRSNQEKKKPTDSRKKQLELAYKAVKKDVKELEKEIGTINFDVLNDRLSSVEPSKLKAKKLYLYYTQLGRCMYSEEPINISELFDNNKYDIDHIYPQSKIKDDSFTNTVLVKRESNAAKTDRYPLGSDIQTPSNRRFWKFLKEKGLISDEKYNRLVRTEEFSDEELSGFIARQLVETSQSVKAVASILGELNPETSICYSKAENVSSFRQNFGKIKKGDRDSKNNDQLIKVREINDYHHAKDAYLNVVVGNVYDTKFTRNVFNFIKDKKDGRKYSLNKVFYENVSDSKTVAWEMDKTIHQVEKVMNNNNIMVTRRTSEQKGGLFDATVYKAKVAAKAKDGVYYPLKTSNSVVKDVAKYGGYTSIGIAYYSIFEYTIVNKKGEEKITRIIPIPIYISQNIKDSTALIEFGKSQIFCRAYEKIKDFKLLYRKLCIGSKININNYQYYIGGKSDERFYYDSAIQVTLDKKSEKYLKILSKYQNWKKENKDGELWENITKENNIELYNKLVEKMNSEIFTKKKSNKYNELNSEEIRNNFIKISVEEQAKVLLEILNLLTNKKSIFDLKSIDIKAARGKISFNLTSLIQFSIIEQSITGFYEKEITIIGDKGNDMENNNS

SEQ ID NO: 236 - protein, 1385 aa, Gemella morbillorum M424
MKNKTWYLGLGVGPTSIGWAATDSNYKLLRKNKKRLWGVRLFEEAKTAVDRRTFRAERRRLARRKWRISLLEELFAKEVSKNDPNFFLRLKESKYHFEDKSLMNEYILFNDKDYTDKDYYKEYPTIYHLRLSLTTEENPDIRKVYLAVHSMLKNRGHFLLQGQSFNDSNIDSVIKELLELETVKINFEVTDEVIHSLKKIALEKKNLSDKNNDVKKLYPKEKQLQEIFKLVFGGKTSLDKLYDIEEYKELDNSVKSISFKEKVYEEVRPDYEQILSNYIELLDLAKLVYDSIVLADIKKEGKTISESKVELYNKHKDDLANLKKLVKIDSKLSEDKKKEVYFTIFKEDKEKGTNYVNYTHRSQEGKSCSYEDFKKFLKKELEKLEDSPTKTTILEELDLETFLPLQRTKDNSVVPYQIHKEELVKILDNAAKYHSFLAEKDDSGYSTREKVVQLFEFRIPYYIGPLNAHHNTENGGYSWAIRKKGMESVPVTPWNFKDVIDESASAEAFVNNLKNKCAYLSGEDVLPKNSLLYSEYALLNELNALRYEGNRISVEARDVIVTKLFKEQGKKVTKKTIKELLKTEGFIDGKGEIVGIDNIVKNDLKSYRDFKKILADKFDKERVENIILWITLYGESRKLIKEKITKVYGDFYTVDEIEKMSRLTYKDWGILSRKLLTELVSEKLYNEETGECLNIIGAMRQGTILFMELLADKFDYMSQIKNHNKENKDDITEITPDILENLHASPAVKRSIWQTVRIVEELKTIIGCVPTKIFIETTKRNNAPYKVPTLNRNDLVTKYKTIREHEIFELEKELKNTLDFTLNKNRLINEEPSKLKATKLYLYYTQLGRCMYTGKKIDLGELFDNNNKYDIDHIYPQSKVKDGSFNNIVLVTKASNDMKADVFPLKSKFQTKENKIFWRFLKEKKLITEEKYNRLVRTEEFSNGELTGFITRQLVETSQAIKVISNVLRELNPETTICYSKAENVSSFRQSFGKIKEANRKAENNEKLIRVQEINDYYNAKDAYLSIVVGNVYDVKFTRNVHNFIKNNKDARRYSLNGLFYTDVKNANTIAWEMDKTVHVVEKTMNNNNILITRRTSEQKGALYDATLYKAKVAEKAKEGTYYPLKTTDSKIKDVGKYGGFTKIKIAYYSIFEYTLDGKKGKQKITRIVPIPIYISQNIKDDKALLEYAQTRLPGKDLKIKYRKLCIGSLVKINNFNYYIGGKTNNNFTFDSAVQVILDKDSESYIKELAKYLNWKKENKDGKLWESITEDKNIQLYDSLVKKMNTGIFIRKTPNKYTELLTLEVKNKFINIDIDEQVKLLLEILNLLTNKKFTSKLNEIGITASRGVCSFNLSNQSQFSIIEQSVTGVYEKEKLIIEKKKEGIL

SEQ ID NO: 237 - protein, 1003 aa, Gluconacetobacter diazotrophicus
MIDESLTFGIDLGIGSCGWAVLRRPSAFGRKGVIEGMGSWCFDVPETSKERTPTNQIRRSNRLLRRVIRRRRNRMAAIRRLLHAAGLLPSTDSDALKRPGHDPWELRARGLDKPLKPVEFAVVLGHIAKRRGFKSAAKRKATNISSDDKKMLTALEATRERLGRYRTVGEMFARDPDFASRRRNREGKYDRTTARDDLEHEVHALFAAQRRLGQGFASPELEEAFTASAFHQRPMQDSERLVGFCPFERTEKRAAKLTPSFERFRLLARLLNLRITTPDGERPLTVDEIALVTRDLGKTAKLSIKRVRTLIGLEDNQRFTTIRPEDEDRDIVARTGGAMTGTATLRKALGEALWTDMQERPEQLDAIVQVLSFFEANETITEKLREIGLTLAVLDVLLTALDAGVFAKFKGAAHISTKAARNLLPHLEQGRRYDEACTMAGYDHAASRLSHHGQIVAKTQFNALVTEIGESIANPIARKALIEGLKQIWAMRNHWGLPGSIHVELARDVGNSIEKRREIEKHIEKNTALRARERREVHDLLDLEDVNGDTLLRYRLWKEQGGKCLYTGKAIHIRQIAATDNSVQVDHILPWSRFGDDSFNNKTLCLASANQQKKRSTPYEWLSGQTGDAWNAFVQRIETNKELRGFKKRNYLLKNAKEAEEKFRSRNLNDTRYAARLFAEAVKLLYAFGERQEKGGNRRVFTRPGALTAALRQAWGVESLKKQDGKRINDDRHHALDALTVAAVDEAEIQRLTKSFHEWEQQGLGRPLRRVEPPWESFRADVEATYPEVFVARPERRRARGEGHAATIRQVKERECTPIVFERKAVSSLKEADLERIKDGERNEAIVEAIRSWIATGRPADAPPRSPRGDIITKIRLATTIKAAVPVRGGTAGRGEMVRADVFSKPNRRGKDEWYLVPVYPHQIMNRKAWPKPPMRSIVANKDEDEWTEVGPEHQFRFSLYPRSNIEIIRPSGEVIEGYFVGLHRNTGALIPTPVGPDSYVIA

SEQ ID NO: 238 - protein, 1050 aa, Gluconacetobacter diazotrophicus
MGENMIDESLTFGIDLGIGSCGWAVLRRPSAFGRKGVIEGMGSWCFDVPETSKERTPTNQIRRSNRLLRRVIRRRRNRMAAIRRLLHAAGLLPSTDSDALKRPGHDPWELRARGLDKPLKPVEFAVVLGHIAKRRGFKSAAKRKATNISSDDKKMLTALEATRERLGRYRTVGEMFARDPDFASRRRNREGKYDRTTARDDLEHEVHALFAAQRRLGQGFASPELEEAFTASAFHQRPMQDSERLVGFCPFERTEKRAAKLTPSFERFRLLARLLNLRITTPDGERPLTVDEIALVTRDLGKTAKLSIKRVRTLIGLEDNQRFTTIRPEDEDRDIVARTGGAMTGTATLRKALGEALWTDMQERPEQLDAIVQVLSFFEANETITEKLREIGLTLAVLDVLLTALDAGVFAKFKGAAHISTKAARNLLPHLEQGRRYDEACTMAGYDHAASRLSHHGQIVAKTQFNALVTEIGESIANPIARKALIEGLKQIWAMRNHWGLPGSIHVELARDVGNSIEKRREIEKHIEKNTALRARERREVHDLLDLEDVNGDTLLRYRLWKEQGGKCLYTGKAIHIRQIAATDNSVQVDHILPWSRFGDDSFNNKTLCLASANQQKKRSTPYEWLSGQTGDAWNAFVQRIETNKELRGFKKRNYLLKNAKEAEEKFRSRNLNDTRYAARLFAEAVKLLYAFGERQEKGGNRRVFTRPGALTAALRQAWGVESLKKQDGKRINDDRHHALDALTVAAVDEAEIQRLTKSFHEWEQQGLGRPLRRVEPPWESFRADVEATYPEVFVARPERRRARGEGHAATIRQVKERECTPIVFERKAVSSLKEADLERIKDGERNEAIVEAIRSWIATGRPADAPPRSPRGDIITKIRLATTIKAAVPVRGGTAGRGEMVRADVFSKPNRRGKDEWYLVPVYPHQIMNRKAWPKPPMRSIVANKDEDEWTEVGPEHQFRFSLYPRSNIEIIRPSGEVIEGYFVGLHRNTGALTISAHNDPKSIHSGIGTKTLLAISKYQVDRFGRKSPVRKEVRTWHGEACISPTPPG

SEQ ID NO: 239 - protein, 1371 aa, Gordonibacter pamelaeae 7-10-1-b
MNLRNVESYQVGLDIGTGSVGWAVLDDNGDLCRFKGKPTWGSRVFPTAETAAEARVHRGQRRRYDRRRQRIDLLQRFFADEVAKVDPEFFIRLNQARLHPENRDPAHADYRWPLFNGSNFTEKDYYRQFPTIYHLRAHLLKSDEPADIRLVYLALHNIVKHRGNFLHQDNPSLSARNANVGDAVEALCLALDEWCGAHDVECACDEAALAEALGDASLRPGEKRERAEAALGVEKAHKKLAKAVSSAVVGYAAEFGHVFFAESEGSKFALSNDEKVEAYVCPDEGRDLFDAMRAVHSSYVLMGILSEAQGELLSVCKVGEYERYKRDLETLKSLVRAYGPERYDEFFCGPFYEGTRDYDPGKAQGYTKYNLGASKLSHEDFLKEVQKLLKDIGAQADERYADIERAIEAGAFLRRLKTSDNGTIPYQLHLEEMDAIIERQAAFYPFLAQEKDKLKSLVSFRIPYYVGPLTQKNAARDGKGEARFAWSSRKPGMEDARVYPWNWEDVIDKDQSAEDFIRRMTGTCTYLKGEPVLARCSLDYELFCVLNELAGARWTQDGDKSYRFDAADRLGIVEDLFKKRKRVTYEAAEKWLARTHGPESGKSAGGAYHVSGGQGEDAFESQLSSHYDFCKILGVDELSDADEAMAEDIILWNTVFEDRSILKRKIKLAYGDRLGDAQVRKLCQKRYTGWGRLSGELLRGLRSATDNGPKTIMDILLEGDPNHARRMGAAMNLMEILHDDLLEFQAKIDEHNRERALAVGGMSVDEVTGSPALRRGINQALRVVDEIAGIAGKPPAHIYVEVTRDEGARNKGRRTTSRYRALEAALSSIKAQCADVYAELKERDPRALDDERLTLYFMQCGKCMYSGDALDINKLQTYQVDHILPQSYVKDDSFENKVLVRPDTNQRKGDTLLLDERLIARMRGFWRTLRDAELIGEKKFNNLTRTSVSDEQMKKFVSRQLVETGQMVKQVQQLLQARYPESEVQPVKAGVSHQLRVGCALAKSREINDFHHAHDAYLACQVGRFVQYRHSAVYSEPVKMAAVVKQFIKKQAEDYRRTRELPGSDGFIVSSFMTPGFDVKTGEVFRDAWDAGAEIDRIRRCFDYKDCFISRMPEETHGAFWDATIYSPRAAGKTLSLPLKRGLDPRKYGSYSREQFAYFFVYEAVKPKKKQRVLEFAPVPVRVASALANDPDALEDYARELAEAEGLVFERIRRRKVYKYQQIIVGDSRLYVTGREEVRNARQLAFSQDETKLICRIEQGEECEEGELLDLFRSMQRKYLACAPRLARLMKVAEMEEGFIAATASGKREVLLSLTSIAAAHRNSIDLKPIGRKGSSGQMKITFSKELSTNGILFVDSSVTGMFERRCRLGL

SEQ ID NO: 240 - protein, 1054 aa, Haemophilus parainfluenzae ATCC 33392
MENKNLNYILGLDLGIASVGWAVVEIDEKENPLRLIDVGVRTFERAEVPKTGESLALSRRLARSARRLTQRRVARLKKAKRLLKSENILLSTDERLPHQVWQLRVEGLDHKLERQEWAAVLLHLIKHRGYLSQRKNESKSENKELGALLSGVDNNHKLLQQATYRSPAELAVKKFEVEEGHIRNQQGAYTHTFSRLDLLAEMELLFSRQQHFGNPFASEKLLENLTALLMWQKPALSGEAILKMLGKCTFEDEYKAAKNTYSAERFVWITKLNNLRIQENGLERALNDNERLALMEQPYDKNRLFYSQVRSILKLSDEAIFKGLRYSGEDKKAIETKAVLMEMKAYHQIRKVLEGNNLKAEWAELKANPTLLDEIGTAFSLYKTDEDISAYLAGKLSQPVLNALLENLSFDKFIQLSLKALYKLLPLMQQGLRYDEACREIYGDHYGKKTEENHHFLPQIPADEIRNPVVLRTLTQARKVINGVVRLYGSPARIHIETGREVGKSYKDRRELEKRQEENRKQRENAIKEFKEYFPHFAGEPKAKDILKMRLYKQQNAKCLYSGKPIELHRLLEKGYVEVDHALPFSRTWDDSFNNKVLVLANENQNKGNLTPFEWLDGKHNSERWRAFKALVETSAFPYAKKQRILSQKLDEKGFIERNLNDTRYVARFLCNFIADNMHLTGEGKRKVFASNGQITALLRSRWGLAKSREDNDRHHALDAVVVACSTVAMQQKITRFVRFEAGDVFTGERIDRETGEIIPLHFPTPWQFFKQEVEIRIFSDNPKLELENRLPDRPQANHEFVQPLFVSRMPTRKMTGQGHMETVKSAKRLNEGISVIKMPLTKLKLKDLELMVNREREKDLYDTLKARLEAFNDDPAKAFAEPFIKKGGAIVKSVRVEQIQKSGVLVREGNGVADNASMVRVDVFTKGGKYFLVPIYTWQVAKGILPNKAATQYKDEEDWEVMDNSATFKFSLHPNDLVKLVTKKKTILGYFNGLNRATGNIDIKEHDLDKSKGKQGIFEGVGIKLALSFEKYQVDELGKNIRLCKPSKRQPVR

SEQ ID NO: 241 - protein, 1052 aa, Haemophilus sputorum CCUG 13788
MKNTSLNYVLGLDLGISSVGWAVVEIDEKENPLSLIDVGVRTFERAETQKGESLALARRLARSARRLTQRRVARLKKAKRLLKSENILLSTDECLPHQVWQLRVEGLERKLERQEWAAVLLHLIKHRGYLSQRKNESKSENKELGALLSGVANNHKLLQQTTYRTPAELAVKKFEVEEGHIRNQQGSYTHTFSRLDLLSEMELLFSRQQHFGNPFTSEKLLENLTALLMWQKPALSGDAILKMLGKCTFENEYKAAKHTYSAERFIWITKLNNLRIQENGLERALNDNERLALMKQPYEKAKLTYAQVRSILNLSDEAIFKGLRYSGEDKKTSETKTVLMEMKAYHQIRLALEKNDLKTEWAELKVNSSLLDEIGTAFSLYKTDEDISTCLAGKLSQPVLNALLENLNFDKFIQLSLKALHKILPLMQQGLRYDEACAEIYGDHYGKKTEENHLLLPQIPADEIRNPVVLRTLTQARKVINGVVRLYSSPARIHIETGREVGKSYQDRRELEKRQEENRKQREKAISEIKTLFPNFSGEPKAKDILKMRLYYQQNAKCLYSGKPLELHRLLEQGYVEIDHALPFSRTWDDSFNNKVLVLANENQNKGNLTPFEWLDGKNNSERWKAFKALVETSAFPYTKKQRILSQKLDEKGFIERNLNDTRYVARFLCNFIADNMHLTGEGKRKVFASNGQITALLRGRWGLAKSREDNDRHHALDAVVVACSTVSMQQKITRFVRFEEGNVFTGERIDRETGEIIPLHFPAPWKFFREEVEIRIFSDNPKLELENRLIARPQANHEFVQPLFVSRMPTRKMIGQGHMETIKSAKRLNEGLSVIKMLLTKLRLKDLESMVNREREKELYEALKARLEAFNDEPAKAFAEPFMKKGGAIVKSVRVEQVQKSGVLVRDGNGVADNASMVRVDVFTKGGKYFLVPIYTWQVAKGILPNKAVIQGKNEEDWEVMDDATFRFSLHQNDLVKLVTKKKTIFGYFNGLNRATGNIDIKEHDLEKSKVKDGIHQSIGIKLALSFEKYQVDELGKNIRLCKSSKRQAVR

SEQ ID NO: 242 - protein, 1052 aa, Haemophilus parainfluenzae
MENKNLHYILGLDLGIASVGWAVVEIDEKENPLRLIDVGVRTFERAETQKGESLALSRRSARSARRLTQRRVARLKKAKRLLKSENILLSTDERLPHQVWQLRVEGLDRKLERQEWAAVLLHLIKHRGYLSQRKNESKSENKELGALLSGVASNHELLQQATYRTPAELAVKKFEVEEGHIRNQQGAYTHTFSRLDLLAEMELLFSRQQHFGNPFASEKLLENLTALLMWQKPALSGEDILKMLGKCTFEDEYKAAKNTYTAERFVWITKLNNLRIQENGLERALSDNERLMLIEQPYEKAKLTYAQVRSILNLSDDAIFKGVRYSGEDKKAIETKTTLMEMKAYHQIRKVLEGNNLKAEWVALKANPTLLDEIGTAFSLYKTDEDISAYLAGKLSQPVLNALLENLSFDKFIQLSLKALYKLLPLMQQGLRYDEACREIYGDHYGKKTEETHHFLPQIPADEIRNPVVLRTLTQARKVINGVVRLYGSPARIHIETGREVGKSYKDRHELKKRQEENRKQREKTISEIKTLFPNFSGEPKGKDILKMRLYYQQNAKCLYSGKPLELHRLFEQKYVEVDHALPLSRTWDDSFNNKVLVLANENQNKGNLTPFEWLDGKNNSERWRTFKALVETSAFPYAKKQRILSQKLDEKGFIERNLNDTRYVARFLCNFIADNMHLTGEGKRKVFASNGQITALLRRRWGLAKSREDNDRHHALDAVLVACSTVAMQQKITRFVRFKAGDVFTGERIDRETGEIIPLHFPTPWQFFKQEVEIRIFSDNPKLELENRLPDRPQANHEFVQPLFVSRMPTRKMTGQGHMETVKSAKRLNEGISMIKMPLTKLKLKDLELMVNREREKDLYDALKTRLEAFNDDPAKAFAEPFMKKGGAIVKSVRVEQVQKSGVLVRQGNGVADNASMVRVDVFTKDGKYFLVPIYTWQVAKGILPNKAVIQGKDEEDWEDIDDATFQFSLHPNDLISVKTKKDEFLGYFNGLNRHTGGINIRTHDLEKSKGKQGIFEGIGVKIALSFEKYQIDELGKNIRLCKPSKRQPVR

SEQ ID NO: 243 - protein, 1052 aa, Haemophilus sputorum HK 2154
MKNTSLNYVLGLDLGISSVGWAVVEIDEKENPLSLIDVGVRTFERAETQKGESLALARRLARSARRLTQRRVARLKKAKRLLKSENILLSTDECLPHQVWQLRVEGLERKLERQEWAAVLLHLIKHRGYLSQRKNESKSENKELGALLSGVANNHKLLQQTTYRTPAELAVKKFEVEEGHIRNQQGSYTHTFSRLDLLSEMELLFSRQQHFGNPFTSEKLLENLTALLMWQKPALSGDAILKMLGKCTFENEYKAAKHTYSAERFIWITKLNNLRIQENGLERALNDNERLALMKQPYEKAKLTYAQVRSILNLSDEAIFKGLRYSGEDKKTSETKTVLMEMKAYHQIRLALEKNDLKTEWAELKVNSSLLDEIGTAFSLYKTDEDISTCLAGKLSQPVLNALLENLNFDKFIQLSLKALHKILPLMQQGLRYDEACAEIYGDHYGKKTEENHLLLPQIPADEIRNPVVLRTLTQARKVINGVVRLYSSPARIHIETGREVGKSYQDRRELEKRQEENRKQREKAISEIKTLFPNFSGEPKAKDILKMRLYYQQNAKCLYSGKPLELHRLLEQGYVEIDHALPFSRTWDDSFNNKVLVLANENQNKGNLTPFEWLDGKNNSERWKAFKALVETSAFPYTKKQRILSQKLDEKGFIERNLNDTRYVARFLCNFIADNMHLTGEGKRKVFASNGQITALLRGRWGLAKSREDNDRHHALDAVVVACSTVSMQQKITRFVRFEEGNVFTGERIDRETGEIIPLHFPAPWKFFREEVEIRIFSDNPKLELENRLIARPQANHEFVQPLFVSRMPTRKMTGQGHMETIKSAKRLNEGLSVIKMLLTKLRLKDLESMVNREREKELYEALKARLEAFNDEPAKAFAEPFMKKGGAIVKSVRVEQVQKSGVLVRDGNGVADNASMVRVDVFTKGGKYFLVPIYTWQVAKGILPNKAVIQGKNEEDWEVMDDATFRFSLHQNDLVKLVTKKKTIFGYFNGLNRATGNIDIKEHDLEKSKVKDGIHQSIGIKLALSFEKYQVDELGKNIRLCKSSKRQAVR

SEQ ID NO: 244 - protein, 1338 aa, Helcococcus kunzii ATCC 51366
MQDYYLGLDIGTNSVGWAVTDENYNLLRKKGKDLWGVRLFKEAQPATERRGHRSSRRRTIRKSLRKQLLRELFEEEINAIDKDFFLRLDESKYWLEDKKIEGKYSLFNDENFTDKDYYEKFPTIFHLRKALIESDDKEDIRLYFLAINQMMKRRGHFLIDGKLSNVEDITPFKECIQNLINEELDTEIETEFYDKAIKIVSDYSLKKTEKKNLIKDLVKETDSIEDSKKIINIFNLLISGKSKVNGIFDDEEILEKIKEDNKEDFYLTSEKYEENLEYFSQLLDYRFELISSLKSIYDYIILQEVLKGKKYLSYAQVERYKNHKEDLRKLKQLIKKYDKNGKIYYQIFRDENFKKGYVAYLGYYKKNKKNVPVKKCDYDTFSKNIKSTLDKICDKEDPLYIELIDKIEKGGFLLKQIVSTNSVIPHQVHELELDKILENLEKNYPSFKEISDGVSKIDKIKMIFNFRIPYYVGPLNDYHKDKVNSNTWIVKNEGFENENIRPWNFSKIVDEHACEEEFIKRMINECSYIPGEKVLPKSSLLYSEYMVLNELNNLRVNGDKLNPKIKKEIVENIYKKERKVTLKKIRNFLIINNYVDSKVEFSGLSDGIKANMSSYIDFAEILDDNFDNNMVEDLIEQITIHVGNVKLLTEKISNKYPNLEKKQINKIVNLKFKDWARFSRKLLVGIEGTEKETGEINTIIGFLRETNENFMELMSNRYTFSEEISEIKKKYIPNKLSKQIVDDLYVSPAVKKMIWQVLNINDELIKVLGKQPKKIFIEMARGKEEKPEVKDSRKNKLIELYKNLGKEGKEWLNRIEDKTEADFRNRALYLYYTQMGRCMYTGEIIDIERLYDKELYDLDHIIPRKMKKDDSIHKNLVLVTRNSNQYEKKDNYPVPEVIKSRENVRHLWYALKKKGLITEEKYNRLTRINPLSDKELSEFIERQLVETRQTTKVVKDLFENYYTDSKIVTVKAGLVSELRRDFEVLKCREINDLNHAHDAFLNIIVGDVWSKKFTSNPYNFVKKNREKYTLNNIFTKNQKDLRGNEIWNCAEGKKRIIKTLNKPSVLFSVENFEQTGQLFDQNIIGKQDYKEKTSYVPIKGDERLQDISKYGGYRGISGAYFFIVEHTEKNKRVKTIESLPIYMKSYVEENGLLDFCTNEMKLVDPKIIVKKLNYKSEIIVDGFKYLISGKTENRLSLETNEYLYWNHTQTTDIKKILNINEKIELEKYNGDIESERENIIKYIQIILEKFKLKPFIKRRNLPNIEINFADYETEKLLQLLVNLIPLTTKYVSPVDLTVISGSKYAGKVLIPKKISNLNEVIFISKSITGIYESRRRII

SEQ ID NO: 245 - protein, 1007 aa, Helicobacter canadensis MIT 98-5491
MKVLGFDIGINSIGWAFVENNELKDCGVRLFTKAENPKTKESLALPRRNARSSRVRLRRRRSRLLSLKHIISKEFGLHYEDYIALDGNLPKAYTGKIESIYKLRYEALSQAISKEDLARVILHIAKHRGYMNKNQKTSQDSEKGAILSAIKENSNKIKHYQTAGEYFYKELFENLRDGTKEFKNIRNKAMKNEKTGNMESTYYNTILASDLEKELKLILEKQQAYHNYSDTFIKEVLEIAFYQRPLKDFSHLVGSCTFYENEKRACKNSYSAWEFIALGKIINTLESIKKDTGEIFSNEIITQILKEVLDKGSLSYTKLRKMINLDEKVKFKGLKYDKEGVEKTNLIEFKKLKEFKKALGEHNLERKTLDEIATHITLTKDENQLKKQLEQYALSQNQIDALAELDFNDHINLSFKALYEILPLMEKGKRYDEACNELGLKAKTSNQKSEFLPAFCDSIFAQELTNPIVNRAISEYRKVLNRLLKKYGKMHKIHIELARDAGLSKEARNKIEKEQKENKDINDKAEKTCKEFGLKPNAKNILKIKLWREQGEICAYSGKKITIDDLKEDKALEVDHIYPYSRSYDDSYNNKVLVFIKENQLKLNQTPYEAFGSNQEKWSKIQVLAQKLPYKKKNRILDENFKNKDQIEFISRNLNDTRYATSLIAKYTKEYLEFLPLSDDEDISLKSGEKGSKTHVQTMNGMLTSVLRHAWGFSQKDRNNHLHHALDAIIIAYSTNSIIKAFSDFKKNQEILKAKLYAKKLTSEEYKNQSKFTGFEKYRSKILEKLDSIFVSKPPNKNTKGALHEQTFYSYQDILEEYKTQEGLKRALECGKVRKIGTKYVVNDRMVRLDIFKKDNKFYGIPIYTMDFALGVLPNKVVTIGTDKDKIKKEWKTIDETYEFCFSLYKGDLVLIQKKEMQESEFAYYNGFDISSASISLEKHDNKFENLTENQKLLFPKAKEGDVEVRGIGIQGLKVFKKYMVTPLGEIQETRTEARQNIQPRKKHGLR

SEQ ID NO: 246 - protein, 1023 aa, Helicobacter cinaedi CCUG 18818 = ATCC BAA-847
MKIYSFDIGVASIGWAFIENEVLQDCGIRIFTKAENPKNGASLALPRREARGVRKRLARRRGRLNTIKQLLCKEFGLQLEDYLSNDGELPKAYTASKANPLKSPYELRTLALSQKLDSKDLVRVILHIAKHRGYGNKHAKDSKDTESGKVKKAIEFNRKTLAEKGYRSVGEYLYREFFQQSRISQNNGATEFINVRNKAGNYEHCVAQDMLKEELESILNAQRQFGFSLKQDFESKLLTKIFEQRPLKSFADKVGNCCFIAGEKRAPKDSPSAIEFIALSRTINTLINLSKESGEIYNRAIILQIVESTLKKGEISYKELREIIRLDERLRFKDPRLDYSREIKEAEKVKFLEFKQLKGFKKALGESFTTLAISQLDEIAEHIALIKDRVKLNEKLESYALTKEQREALSNLSFSAHINLSLQALKQILPFMRGDNGEQCLDYDESVEKAGLKALSKDTLKGQMLPPLNEFEPYLSNPVVARALAEYRKVLNVLLKQYGSPHKIHIEYAREAKLSSTERQKYEKEQKDNYAANQAAHKKCQELGLEPSSTNLLKLKLWQEQGGLCLYSGAKITISYLQDPTALQVDHIYPYSRSFDDSYMNKCLVLTKANQEKGNRTPFEAFGTDSAKWGVITTLAQKLPHKKRRRILNTAFNDKEAGFKLRNLNDTSYIARLVADYTETYLEFLPLVESENTTLSKGQKGSKKHIAIVNGVLTSTMRYYLGFASKDRDNHLHHALDAVIIGFMNDSVIKAFSDFKKTQETSKAAYYAHTLSKQEYKKQRAFIQLPSGENFRVSVLEKVESVFVSKPPRKRVRGALHEATFYSPNDPKLLKNYGGTKGVERALALGKMRKVGAKIVSNGAMVRVDIFRHKSSGKFYGVPVYTMDFALGILPNKAVVVGKDQNGVIKDWLEMDSSYEFIFSLYKDDVILVQKKEMQRPELCYFVSFDTSGASIKVAKHDNNFSTLTENQKLLFSNATKEEVVGKSIGIQNLKVFEKWQVSVLGEVKRTQSYPRENISLASKAKK

SEQ ID NO: 247 - protein, 1023 aa, Helicobacter cinaedi CCUG 18818
MKIYSFDIGVASIGWAFIENEVLQDCGIRIFTKAENPKNGASLALPRREARGVRKRLARRRGRLNTIKQLLCKEFGLQLEDYLSNDGELPKAYTASKANPLKSPYELRTLALSQKLDSKDLVRVILHIAKHRGYGNKHAKDSKDTESGKVKKAIEFNRKTLAEKGYRSVGEYLYREFFQQSRISQNNGATEFINVRNKAGNYEHCVAQDMLKEELESILNAQRQFGFSLKQDFENKLLTKIFEQRPLKSFADKVGNCCFIAGEKRAPKDSPSAIEFIALSRTINTLINLSKESGEIYNRAIILQIVESTLKKGEISYKELREIIRLDERLRFKDPRLDYSREIKEAEKVKFLEFKQLKGFKKALGESFTTLAISQLDEIAEHIALIKDRVKLNEKLESYALTKEQREALSNLSFSAHINLSLQALKQILPFMRGDNGEQCLDYDESVEKAGLKALSKDTLKGQMLPPLNEFEPYLSNPVVARALAEYRKVLNVLLKQYGSPHKIHIEYAREAKLSSTERQKYEKEQKDNYAANQAAHKKCQELGLEPSSTNLLKLKLWQEQGGLCLYSGAKITISYLQDPTALQVDHIYPYSRSFDDSYMNKCLVLTKANQEKGNRTPFEAFGTDSAKWGVITTLAQKLPHKKRRRILNTAFNDKEAGFKLRNLNDTSYIARLVADYTETYLEFLPLVESENTTLSKGQKGSKKHIAIVNGVLTSTMRYYLGFASKDRDNHLHHALDAVIIGFMNDSVIKAFSDFKKTQETSKAAYYAHTLSKQEYKKQRAFIQLPSGENFRVSVLEKVESVFVSKPPRKRVRGALHEATFYSPNDPKLLKNYGGTKGVERALALGKMRKVGAKIVSNGAMVRVDIFRHKSSGKFYGVPVYTMDFALGILPNKAVVVGKDQNGVIKDWLEMDSSYEFIFSLYKDDVILVQKKEMQRPELCYFVSFDTSGASIKVAKHDNNFSTLTENQKLLFSNATKEEVVGKSIGIQNLKVFEKWQVSVLGEVKRTQSYPRENISLASKAKK

SEQ ID NO: 248 - protein, 1023 aa, Helicobacter cinaedi
MKIYSFDIGVASIGWAFIENEVLQDCGIRIFTKAENPKNGASLALPRREARGVRKRLARRRGRLNTIKQLLCKEFGLQLEDYLSNDGELPKAYTASKANPLKSPYELRTLALSQKLDSKDLVRVILHIAKHRGYGNKHAKDSKDTESGKVKKAIEFNRKTLAEKGYRSVGEYLYREFFQQSRISQNNGATEFINVRNKAGNYEHCVAQDMLKEELESILNAQRQFGFSLKQDFENKLLTKIFEQRPLKSFADKVGNCCFIAGEKRTPKDSLSAIEFIALSRTINTLINLSKESGEIYNRAIILQIVESTLKKGEISYKELREIIRLDERLRFKDPRLDYSREIKEAEKVKFLEFKQLKGFKKALGESFTTLARSQLDEIAEHIALIKDRVKLNEKLESYALTKEQREALSNLSFSAHINLSLQALKQILPFMRGDNGEQCLDYDESVEKAGLKALSKDTLKGQMLPPLNEFEPYLSNPVVARALAEYRKVLNALLKQYGSPHKIHIEYAREAKLSSTERQKYEKEQKDNYAANQAAHKKCQELGLEPSSTNLLKLKLWQEQGGLCLYSGAKITISYLQDPTALQVDHIYPYSRSFDDSYMNKCLVLTKANQEKGNRTPFEAFGTDSAKWGVITTLAQKLPHKKRRRILNTAFNDKEAGFKLRNLNDTSYIARLVADYTETYLEFLPLVESENTTLGKGQKGSKKHIAIVNGALTSTMRYYLGFASKDRDNHLHHALDAVIIGFMNDSVIKAFSDFKKTQETSKAAYYAHTLSKQEYKKQRAFIQLPSGENFRASVLEKVESVFVSKPPRKRVRGALHEATFYSPNDPKLLKNYGGTKGVERALALGKMRKVGAKIVSNGAMVRVDIFRHKSSGKFYGVPVYTMDFALGILPNKAVVVGKDKNGVIKDWLEMDSSYEFIFSLYKDDLLLVQKKEMAEPELCYFMSFNSSIAQISVAKHDNNFSTLTKNQKLLFSNATQEDVSGKSIGIQNLQVFEKWQVSVLGEVKRTQSYPRENISLASKAKK

SEQ ID NO: 249 - protein, 1024 aa, Helicobacter mustelae
MIRTLGIDIGIASIGWAVIEGEYTDKGLENKEIVASGVRVFTKAENPKNKESLALPRTLARSARRRNARKKGRIQQVKHYLSKALGLDLECFVQGEKLATLFQTSKDFLSPWELRERALYRVLDKEELARVILHIAKRRGYDDITYGVEDNDSGKIKKAIAENSKRIKEEQCKTIGEMMYKLYFQKSLNVRNKKESYNRCVGRSELREELKTIFQIQQELKSPWVNEELIYKLLGNPDAQSKQEREGLIFYQRPLKGFGDKIGKCSHIKKGENSPYRACKHAPSAEEFVALTKSINFLKNLTNRHGLCFSQEDMCVYLGKILQEAQKNEKGLTYSKLKLLLDLPSDFEFLGLDYSGKNPEKAVFLSLPSTFKLNKITQDRKTQDKIANILGANKDWEAILKELESLQLSKEQIQTIKDAKLNFSKHINLSLEALYHLLPLMREGKRYDEGVEILQERGIFSKPQPKNRQLLPPLSELAKEESYFDIPNPVLRRALSEFRKVVNALLEKYGGFHYFHIELTRDVCKAKSARMQLEKINKKNKSENDAASQLLEVLGLPNTYNNRLKCKLWKQQEEYCLYSGEKITIDHLKDQRALQIDHAFPLSRSLDDSQSNKVLCLTSSNQEKSNKTPYEWLGSDEKKWDMYVGRVYSSNFSPSKKRKLTQKNFKERNEEDFLARNLVDTGYIGRVTKEYIKHSLSFLPLPDGKKEHIRIISGSMTSTMRSFWGVQEKNRDHHLHHAQDAIIIACIEPSMIQKYTTYLKDKETHRLKSHQKAQILREGDHKLSLRWPMSNFKDKIQESIQNIIPSHHVSHKVTGELHQETVRTKEFYYQAFGGEEGVKKALKFGKIREINQGIVDNGAMVRVDIFKSKDKGKFYAVPIYTYDFAIGKLPNKAIVQGKKNGIIKDWLEMDENYEFCFSLFKNDCIKIQTKEMQEAVLAIYKSTNSAKATIELEHLSKYALKNEDEEKMFTDTDKEKNKTMTRESCGIQGLKVFQKVKLSVLGEVLEHKPRNRQNIALKTTPKHV

SEQ ID NO: 250 - protein, 1688 aa, Ignavibacterium album
MEFKKVLGLDIGTNSIGCALLSLPKSIQDYGKGGRLEWLTSRVIPLDADYMKAFIDGKNGLPQVITPAGKRRQKRGSRRLKHRYKLRRSRLIRVFKTLNWLPEDFPLDNPKRIKETISTEGKFSFRISDYVPISDESYREFYREFGYPENEIEQVIEEINFRRKTKGKNKNPMIKLLPEDWVVYYLRKKALIKPTTKEELIRIIYLFNQRRGFKSSRKDLTETAILDYDEFAKRLAEKEKYSAENYETKFVSITKVKEVVELKTDGRKGKKRFKVILEDSRIEPYEIERKEKPDWEGKEYTFLVTQKLEKGKFKQNKPDLPKEEDWALCTTALDNRMGSKHPGEFFFDELLKAFKEKRGYKIRQYPVNRWRYKKELEFIWTKQCQLNPELNNLNINKEILRKLATVLYPSQSKFFGPKIKEFENSDVLHIISEDIIYYQRDLKSQKSLISECRYEKRKGIDGEIYGLKCIPKSSPLYQEFRIWQDIHNIKVIRKESEVNGKKKINIDETQLYINENIKEKLFELFNSKDSLSEKDILELISLNIINSGIKISKKEEETTHRINLFANRKELKGNETKSRYRKVFKKLGFDGEYILNHPSKLNRLWHSDYSNDYADKEKTEKSILSSLGWKNRNGKWEKSKNYDVFNLPLEVAKAIANLPPLKKEYGSYSALAIRKMLVVMRDGKYWQHPDQIAKDQENTSLMLFDKNLIQLTNNQRKVLNKYLLTLAEVQKRSTLIKQKLNEIEHNPYKLELVSDQDLEKQVLKSFLEKKNESDYLKGLKTYQAGYLIYGKHSEKDVPIVNSPDELGEYIRKKLPNNSLRNPIVEQVIRETIFIVRDVWKSFGIIDEIHIELGRELKNNSEERKKTSESQEKNFQEKERARKLLKELLNSSNFEHYDENGNKIFSSFTVNPNPDSPLDIEKFRIWKNQSGLTDEELNKKLKDEKIPTEIEVKKYILWLTQKCRSPYTGKIIPLSKLFDSNVYEIEHIIPRSKMKNDSTNNLVICELGVNKAKGDRLAANFISESNGKCKFGEVEYTLLKYGDYLQYCKDTFKYQKAKYKNLLATEPPEDFIERQINDTRYIGRKLAELLTPVVKDSKNIIFTIGSITSELKITWGLNGVWKDILRPRFKRLESIINKKLIFQDEDDPNKYHFDLSINPQLDKEGLKRLDHRHHALDATIIAATTREHVRYLNSLNAADNDEEKREYFLSLCNHKIRDFKLPWENFTSEVKSKLLSCVVSYKESKPILSDPFNKYLKWEYKNGKWQKVFAIQIKNDRWKAVRRSMFKEPIGTVWIKKIKEVSLKEAIKIQAIWEEVKNDPVRKKKEKYIYDDYAQKVIAKIVQELGLSSSMRKQDDEKLNKFINEAKVSAGVNKNLNTTNKTIYNLEGRFYEKIKVAEYVLYKAKRMPLNKKEYIEKLSLQKMFNDLPNFILEKSILDNYPEILKELESDNKYIIEPHKKNNPVNRLLLEHILEYHNNPKEAFSTEGLEKLNKKAINKIGKPIKYITRLDGDINEEEIFRGAVFETDKGSNVYFVMYENNQTKDREFLKPNPSISVLKAIEHKNKIDFFAPNRLGFSRIILSPGDLVYVPTNDQYVLIKDNSSNETIINWDDNEFISNRIYQVKKFTGNSCYFLKNDIASLILSYSASNGVGEFGSQNISEYSVDDPPIRIKDVCIKIRVDRLGNVRPL

SEQ ID NO: 251 - protein, 1092 aa, Ilyobacter polytropus
MKYSIGLDIGIASVGWSVINKDKERIEDMGVRIFQKAENPKDGSSLASSRREKRGSRRRNRRKKHRLDRIKNILCESGLVKKNEIEKIYKNAYLKSPWELRAKSLEAKISNKEIAQILLHIAKRRGFKSFRKTDRNADDTGKLLSGIQENKKIMEEKGYLTIGDMVAKDPKFNTHVRNKAGSYLFSFSRKLLEDEVRKIQAKQKELGNTHFTDDVLEKYIEVFNSQRNFDEGPSKPSPYYSEIGQIAKMIGNCTFESSEKRTAKNTWSGERFVFLQKLNNFRIVGLSGKRPLTEEERDIVEKEVYLKKEVRYEKLRKILYLKEEERFGDLNYSKDEKQDKKTEKTKFISLIGNYTIKKLNLSEKLKSEIEEDKSKLDKIIEILTFNKSDKTIESNLKKLELSREDIEILLSEEFSGTLNLSLKAIKKILPYLEKGLSYNEACEKADYDYKNNGIKFKRGELLPVVDKDLIANPVVLRAISQTRKVVNAIIRKYGTPHTIHVEVARDLAKSYDDRQTIIKENKKRELENEKTKKFISEEFGIKNVKGKLLLKYRLYQEQEGRCAYSRKELSLSEVILDESMTDIDHIIPYSRSMDDSYSNKVLVLSGENRKKSNLLPKEYFDRQGRDWDTFVLNVKAMKIHPRKKSNLLKEKFTREDNKDWKSRALNDTRYISRFVANYLENALEYRDDSPKKRVFMIPGQLTAQLRARWRLNKVRENGDLHHALDAAVVAVTDQKAINNISNISRYKELKNCKDVIPSIEYHADEETGEVYFEEVKDTRFPMPWSGFDLELQKRLESENPREEFYNLLSDKRYLGWFNYEEGFIEKLRPVFVSRMPNRGVKGQAHQETIRSSKKISNQIAVSKKPLNSIKLKDLEKMQGRDTDRKLYEALKNRLEEYDDKPEKAFAEPFYKPTNSGKRGPLVRGIKVEEKQNVGVYVNGGQASNGSMVRIDVFRKNGKFYTVPIYVHQTLLKELPNRAINGKPYKDWDLIDGSFEFLYSFYPNDLIEIEFGKSKSIKNDNKLTKTEIPEVNLSEVLGYYRGMDTSTGAATIDTQDGKIQMRIGIKTVKNIKKYQVDVLGNVYKVKREKRQTF

SEQ ID NO: 252 - protein, 1354 aa, Indibacter alkaliphilus LW1
MKKILGLDLGTTSIGWAFIKEPEKDVVGSEIVDMGVRIVPLSSDEENDFAKGNTISINADRTLKRGARRNLQRFKQRRNALLETFKEKNLIPSNFQYAEDGPSSTFSTLKLRDKAAKEKIELDDFVKVLLQINKKRGYKSSRKAMSEEDEGTAIDSMGIAKELYENDLTPGQWVYEALKNGRKNVPDFYRSDLQEEFKKIVNYQSEFYPDILNTSFVEDWMGKASTPTKQYFNKRGVQLAENKGKREERRLQEYKWRAEAVNFKIDLSEIALILSQINSQISNSSGYLGAISDRSKELYFKNLTVGQYLYQQVKKNPHTRLKGQVFYRQDYLDEFEKIWSVQSSFYPQLNDELKQEVRDVTIFFQRRLKSQKHLISNCEFEEHHKVVPKSHPIFQEFRIWQNLNNLTLIKKDNLNEKCELALEDKTALANELAFKKELSVKDALKVLGLKPSDWEFNFTKIEGNRTNHAFFEAFAKIIELEDGEPIDLGNLKADDILDQFSEAFLRIGIDTELLQVNSDIEGAEYEKQSYIQFWHLLYSSEDDQKLKQNLIRKFGFKPEHAKILASISLQDDHASLSSRAIKKILPHLQSGLIYDKACTYAGYNHSSSFTKDENEKRELRAELELLKKNSLRNPVVEKILNQMINVVNAILKDPNLGRPDEIRVEMARELKANAEQRKNMTSNIASATRDHEKYREILKKEFGLKRVTKNDLLRYKLWLETDGISLYTGKPIEASKLFSKEYDIEHIIPKARLFDDSFSNKTICERQLNIDKANVTAFSFLQNKLSADEFEQYQSRVKSLYGKLSKAKIQKLLMANDKIPEDFIARQLQETRYISKKAKEILFEITMRVSVTTGTITDKLREDWGLVEIMKELNWEKYDKLGLTYTIEGKHGERLNKIKDWNKRNDHRHHAMDALTVALTKPAYIQYLNNLNAKAIGNKKGTEIFAIEQKYLKRENGKLCFIPPIENIRAEAKKHLSKILVSYKAKNKVVTINKNKTKKKAGFNEQTALTPRGQLHKETVYGKSFHYSTKFEKIGASFDAQKINTVAKKEEREALLKRLAENGNDPKKAFTGKNSLNKMPIYLDLGKNIKLSEKVKTVVLEQNYTIRKNIDPDLKVDKVIDVGIKRILESRLEEFGGNAKLAFSNLEENPIWLNKEKGIPIKRVKISGVSNVESLHVKKDHFGEKILDEEGNEIPVDFVSTGNNHHVAIYEDEDGNLQDEVVNFYEAVIRRNQGESIIKYRHEEGWNFLYSIKQNEFFVFPSQDFNPNDFDLLDPKNYDLISPNLYRAQKFSKVMYGNSAVRDYVFRHHLETVLNDVKELKDVAYKQLKSLQYLNGIKKVRLNHLGQIIQVGEY

SEQ ID NO: 253 - protein, 1397 aa, Joostella marina DSM 19592
MKKVLGLDLGTNSIGWALVNEATKEEKKEGKSSEIIKLGVRVNPLTVDEKTNFEKGRPLSTNADRTLKRSARRNLQRYKLRRRNLIEILIKNGFITKDTPLTETGKDTTHQTLKLRAKSAKEKVDLKDFAKILLTINKKRGYKSSRKVNSDEDGLAIDGMAVAKHLYEQNLTPGQYVLNLLQKNKKYVPDFYRSDLQEEFKNIWNNQKTYYFDILTDTLFEELKDKNKSQTWAICKKPFDIAGIKQIGKASDKRLERYKWRTEGLTQKLNLEYLAIALQEINNDINKSSGYLGAISDRSKELFFNKETVGENLYRQLVKTPHTSLRNQVFYRQDYLDEFETIWETQAKFYPQLTHTLKEEIRDVIIFYQRKLKSQKSLISFCQFESWEQTYIEKETGKSKTRTVGRKVIPKSSPLFQEFKIWQNLNSLEFRNSDEGEIIEFIKLDEDIRQTVFEELNLRGNLKPNDVLKILGNYISLGKVSQWKCNFEEIEGNRTNAALYNVYQIIAENEGYGFDWAKKTASEINKELKNIFPQLGIDASILDFDFTQANFDKQTSYQLWHLLYSAEEDFKISEEDKVLYGNSSVSLKKKLHQKYGFKPEYTKLLTNISLQPDYGNLSAKAICNILPYLKENNVYSEACDLTGYNHSNFLTAEEQAKRPLKPILELLKKNSLRNPVVEKILNQMVNVVNQVIETYGKPDEIRIELTRELKKSAKERANMTKSIADATRRNDDYRKTIIKEFGIPNPTKSDVVRYRLWQELASRGYKDIFTDTEIKPQELFSNKIDIEHIIPKALLFDDSFSNKTLAFKKDNLKKANRTAYDFIANDYAPNLENYIERVESLHKDRKITRAKRNKLLMLQSKLPDGFIERDLRNSQYITKEAKKMLYEVCRTVVSTSGSITDKLREDWDLINVMKELNFPKYKALGLTEKIERYDIGAEKMKEVEIIEDWNKRNDHRHHAIDALTVAFSTHSHIQYLNHLNARRDEGHKKHAAIIAIESTITEKEGNKKRRFIAPLPNFRLQAKEHIESILVSFKNKNKVVTNNINKTKRIKKDKFNTKVQLTPRGQLHKETIYGKIKQPLEKHIKLNKSFTLEQAKLIIDKRQREKVLNHLEKYAHNSDIAFNSKTLKKNPLLISDEPLKEVLCFEEVFTIRKDISYDNFKNEKQLDKVIDEKVKQALKERINQYNGDFREAFSDIERNPIWLNKAKGICVKRATIKGVSNAEPLHTAKNHLGEEVLTENKEQIPVDYVSTGNNHHVAIYEDEDGNLQEKVVSFYEAVIRVNEGLPIIDKEYNKSLGWTFKFTMKQNEMFVFPSEDFNPTEIDLLDQKNASLISPNLFRVQKFTIKDYFFRHHLETTVENNNTLKNTTWRREGLSGIYGIIKIRLNHLGEIVQVGEY

SEQ ID NO: 254 - protein, 1060 aa, Kingella kingae PYKK081
MAAKSLNYILGLDLGIASCGWAVVEMDEQENPLRLIDVGVRTFEEAENPKDGSSLAETRRLARAQRRLISRRANRMNKLCRLLKQENVLQANDYDEKGLIIGLPNQAWELRAQGLDRKLEPKEWAAVLIHLVKHRGYLSQRKNESQTADKELGALLSGMNHNHQLLQSQSNQYRTPAELAIKQFATQDGHIRNQRGAYTHTFNRLDLQNELNQLFDAQTRLGNPHVSGSLKTAINDLLMNQKAALSGDAILEMLGRCTFEPSEYKAAKNTYSAERFVWLGKLTNLRIQDNGLESALSREQRELLLNEPYNKTKLTYQQVRKLLRLPETAFFKGLRYGKDNAESATFMEMKSYHAIRKSLENKSLKSEWEKLKTQPKLLDLIGTAFSIYKTDDEIAGCLKNQLPENVIIALQGQLNFSNFMELSLKALEKLLPLMEQGLRYDEACTQIYGNRHEKIADKTEKFLPNIPADKLRNPVVLRTLTQARKVINAIIRRYGSPARVHIETGREVGKSFSDRDKLKKQQEENQEQRRRAIDEWKQFFPNAAHEPKAVDILKLRLYQLQQGKCLYSGLPIDVRRLPEKGYVEIDHALPFSRTWDDSFNNKILVLASENQNKGNQTPYEYLRGADNSESWRLFVENVQNCQFSPNKKQKIMAKQLDEKGFLERNLNDTRYVSRFLCQFISEHLHLTGKGKKRVFASNGQITALLRGRWGLSKNREENDRHHAVDAVVVACSTVAMQQKITQFVRYQKGNVFTGERIDKETGEVISIHFPTPWEHFREEVMIRVFDDNPLRTLPEKLPNRPEALHEYVMPLFVSRMPTRKMTGQGHKETIKSAKRLDEKISVLRVPLTQLKLNDLENMVNREREPALYEALKARLEQFKNDPAKAFAEPFFKQGGQQVKAVRVEIVQKSGMLLRKINGVADNGSMVRVDVFEKSGKFYLVPIYAWQVAEGILPNYAVVAHKDESDWILMDESYHFKFALYKNDLLEVQTKKGGIMGYFASLDRATGAITIREHDRDKKKCKDGEHRSIGVKMASSFKKLQVDELGKNIHETRSRKRPNIG

SEQ ID NO: 255 - protein, 1391 aa, Kordia algicida OT-1
MKKILGLDLGTNSIGWALVNEAEHEHEQSSIVKLGVRVNPLSVDEKTNFEKGRPLSINADRTSKRSARRNLQRFKLRRKNLINLLLKHHIISNETILTEVGKNTTHQTLKLRSKATQEKISLEEFARILLSINKKRGYKSSRKEKNEDEGFTIDGMAIAKELYDNQLTPGQYVYNILQDGKNYIPDFYRSDLQAEFDDVWQFQKKFYSSILTDEFYLKLKGQGKENTRKLFLAIHQVYTAENKGKRDAVKLQYYKWRSEAVKKQLSIEEVAYVLVEINNNINKSSGYLGAISDRSKALYFNNETVGEYLYGQLVKNRHNSLRNQVFYRQDYLDEFEKIWETQAKFYDELTNELKQEIRDVVIFYQRKLKSQKHLISDCLFEKHHKAIPKSSPLFQEFKIWQNLNYLEFVHTQSKEKIFFSELDDETRQFVFAELNIRGTLKIKEIKKLIGLETPVYWKSNFDEIEGNRTNQVLYNVYQNIADDLGYGFDWSKKHAFEINAELQAIFKDVGIDTAILNFDASIEENDFDKQKSYQLWHLLYSAEDTDKATEEDKLIYGNINTKLKKQLHQKYGFEAKYGNLLANISLQQDYGNLSAKAIKKILPYLESGNSFYEACTIVGYNPSNSLTKEQQQNRKLKDKLELLPKNSLRNPVVEKILNQKVNLINQLIDEYGKPDEVRIELARELKKSAKQRADLSKHINDATLKNQNIRKTLQKDFGIQNPSKNDVIRYKLYDELKDNGYKTLFTNKYIPKEQLFSKDVDIEHIIPKAILFDDSFSNKTLAYRNVNLAKADATAFDFISSKHLDDLDNYKARVETLFQSKRISKGKYKKLLMTRQNLPEDFIERDLRNSQYIAKKATAMLKEVFRSVVPTSGRITDKLREDWDLVNVMKELNLPKYRTLGLTEFIERKNGNKIEQIIDWTKRNDHRHHAMDALTVAFTTHNHIQYLNNLNVTHGLNGVDTDHEKSRLYAIKQAITKVYIVGKTKKRKFIPPMENFRSHAKNHLEGILISFKNKNKVVTKNKNRTKTKTKGVFNEKIQLTPRGQLHKETIYGHAKKVIVTKEKVSSKFTHEKILQVTKPAYREALLKRLASFKNDPKKAFSGKNALSKNPLYFDITSGKKVPDTVKLSYFENSYVIRKEVNSDNFKNEKSLQKVLDVGIRRILEKRLADYNGNAKEAFSNLEKNPIWKDKEKGVCIKKVRIEALKNAEPLHVKKDHLGKIILDDENKSTPVDFISTGNNHHVAIYEDKDGKLHDKVVSFYEVVSRVNLGLPIIDKSFNSHLDWKFLFSMKQNEMFVFPSEDFNPKEIDIGNPKNNELISKYLFRVQKFSKVTYGNSAVRDYVFRHHLETELIDKKELKGITYYQLKSIGMLEKLVKVRINHIGKIVHIGEY

SEQ ID NO: 256 - protein, 1314 aa, Lactobacillus animalis KCTC 3501
MLKKDYSIGLDIGTNSVGHAVVTDDYKVPTKKMKVFGDTSKKTIKKNMLGVLLFNEGQTAADTRLKRGTRRRYTRRKNRLRYLQEIFAPELAKVDPNFLYRLEESSLVAEDKKYDVYPIFGKREEELLYHDTYKTIYHLRSALANNDQPADLRLVYLALAHIIKYRGNFLLEGEIDLRTTDINKVFAEFSETLNENSDENLGKLDVADIFKNNTFSKTKKSEELLKLSGAKKNQLAHQLFKMMVGNMGSFKKVLGTDEEHKLSFGKDTYEDDLNDLLAEAGDQYLDIFVAAKKVYDAAILASILDVKDTQTKTVFSQAMIERYEEHQKDLIELKRVFKKYLPEKCHDFFSEPKISGYAGYIDGKVSEEDFYKYTKKTLKGIPETEEILQKIDANNYLRKQRTFDNGAIPHQVHLKELVAIVENQGKYYPFLRENKDKFEKILNFRIPYYVGPLARGNSKFAWLTRAGEGKITPYNFDEMIDKETSAEDFIKHMTINDLYLPTEPVLPKHSLLYERYTIFNELAGVRYVTENGEAKYFDAQTKRSIFELFKLDRKVSEKMVIKHLKVVMPAIRIQALKGLDNGKFNASYGTYKDLVDMGVAPELLNDEVNSEKWEDIIKTLTIFEGRKLIKRRLENYRDFLGEDILRKLSRKKYTGWGRLSAKLLDGIYDKKTHKTILDCLMTEDYSQNFMQLINDDNYSFKETIKNAQVIEKEETLAKTVQELPGSPAIKKGILQSLEIVDEIIKVMGYKPKSIVVEMARETQKTHGTRKREDRVQQIVENLKDANELPEKLPSNAELSDERKYLYCLQNGRDMYTGAPLDYDHLQFYDVDHIIPQSFLKDDSIENKVLTIKKENVRKTNGLPSEAVIQKMGSFWKKLLDAGAMTNKKYDNLRRNLHGGLNEKLKERFIERQLVETRQITKYVAQLLDQRLNYDGNGVELDEKIAIVTLKAQLASQFRSEFKLRKVRALNNLHHAHDAYLNAIVANLIMAKYPELEPEFVYGKYRKAKFKGLGKATAKNTLYANVLYFLKENEVYPFWDKARDLPTIKRYLYRAQVNKVRKAERQIGGFSDEMLVPKSDSGKLLPRKEGLDPVKYGGYAKAVESYAVLITADEVKKGKTKKVKTLVNIPIIDSKKYEADPTAYLASRGYTNVTNSFILPKYSLLEDPEGRRRYLASFKEFQKANELILPQHLVELLYWVNAKDGEQKLEDHKAEFKELFDKIMEFADKYVVAPKNSEKIRRLYEENQDATPMELGKNFVELLRYTADGAASDFKFFGENIPRKRYNSAGSLLNGTLIYQSKTGLYETRIDLGKL

SEQ ID NO: 257 - protein, 1377 aa, Lactobacillus brevis subsp. gravesensis ATCC 27305
MESNHDGEQVKYTLGLDIGTSSIGYAAIDKHQKPIRAKGKHVIGVRLFQEGQTAADRRAFRTTRRRLKRRKWRLNLLNRLFDPYLSEVDPNFLPRLRQSNLSPKDDNKHFNGSTLFPDKTDAAFYRQYPTMYHLRYALMTEKRKFDIREVYLAIHHIVKYRGNFLNSATVDSFKTSNIDFTSQFDRLNELYRQVILDEPFQINMDQVDEMTNKLLDNDALKLDTQKQVAKLLPVIYNDKPIDKQYTRIATEFSKAILGYKTKLDVILNLDTQNAKDWVIRLDDEDIDDKLPALVENLDESRQEIVTIIRDLYAQITLNAIVPKGKSLSESMVDKYNDHKDHLDLLMGLIHELGDDSAKGIKLREAYTQYVGKSDDKTLNQDDFYAAIKKNLDEDSKRSPKIQRLIEQASFMPKQRTSANGVIPHQLHQLELDRIIENQGRYYPFLKKPNPNTHKPNGGKYKLDELVAFRIPYYVGPLITKRDQEKTSGADFAWMIRKPGQEGEITPWNFDQKVDRMASANRFIRRMTTKDSYLVAEDVLPDASLIYEKFKALNELNMLKVNDSRLSPSQKQDLFNNLFKKQKTIRTKKLQTYIRTNWELPSVMISGLADPDKFNSSLSTYIDFRDIFGEKVDDPNRQADYEEIIEWSTVFEDRKIYQAKLNQLDWLTEPQRKALLTKRYTGWGRLSKKLLTGLKDQNGDSILDQLWKTNDNFMQIQSRDEFAKQIHDENAKQFHEANNVDDILDDAFTSPQNKKAIRQVDKVVQDVVKAVGYAPDKIAIEFTRSLENNPQRTVSRQRQLQAAYKNIPREIMKSGLMAELGSVADSKKVLSDKLYLYFTQMGKDMYEDKTINIDNLPNYDIDHILPQAFIKDDSIDNRVLISKEENARKSNRVPLKFFGAKRMGFWKDLLNNGLISNRKFQNLTTDPEKISKYSAKGFIHRQLVETSQVIRLVANILGNEYSQAGTTIIEVSAKMNRQLREDFHLIKNRNVNDYHHAMDAYLTAYVGDYLYLRYPKLRPYFVYGDFKKAEDQDLNIRNFNFLHDLKDNESLDKIVDSETGEIVWEKHGSVKQLKKVYHYKFMLVSQEVYTRQDALFNQTIYPASDADKRKLIPIKNSKPVDVYGGYSGNIDAYMAIVRVHGKKEDNYKVVGIPMRAVTKLKKAEKEGHDSYLNAVHEVLKPQFTKKKKNRKTGEITETVDEFDVLLGKVYYRQLIVDGNKKFMLGSSSYQYNAKQLVLSDKAMQVLSKNGKVKSQDENQNLIDVYDEILEKVDQYFELYDQRHYRESLHKGRGIFVNLPLSNQYDGSKLTSYGKYETIDAILNGLHANATMSNLRYLGISSPFGKMQASNGLTIDPDSIICYQSPTGLFERQIKLSDL

SEQ ID NO: 258 - protein, 1371 aa, Lactobacillus buchneri
MKVNNYHIGLDIGTSSIGWVAIGKDGKPLRVKGKTAIGARLFQEGNPAADRRMFRTTRRRLSRRKWRLKLLEEIFDPYITPVDSTFFARLKQSNLSPKDSRKEFKGSMLFPDLTDMQYHKNYPTIYHLRHALMTQDKKFDIRMVYLAIHHIVKYRGNFLNSTPVDSFKASKVDFVDQFKKLNELYAAINPEESFKINLANSEDIGHQFLDPSIRKFDKKKQIPKIVPVMMNDKVTDRLNGKIASEIIHAILGYKAKLDVVLQCTPVDSKPWALKFDDEDIDAKLEKILPEMDENQQSIVAILQNLYSQVTLNQIVPNGMSLSESMIEKYNDHHDHLKLYKKLIDQLADPKKKAVLKKAYSQYVGDDGKVIEQAEFWSSVKKNLDDSELSKQIMDLIDAEKFMPKQRTSQNGVIPHQLHQRELDEIIEHQSKYYPWLVEINPNKHDLHLAKYKIEQLVAFRVPYYVGPMITPKDQAESAETVFSWMERKGTETGQITPWNFDEKVDRKASANRFIKRMTTKDTYLIGEDVLPDESLLYEKFKVLNELNMVRVNGKLLKVADKQAIFQDLFENYKHVSVKKLQNYIKAKTGLPSDPEISGLSDPEHFNNSLGTYNDFKKLFGSKVDEPDLQDDFEKIVEWSTVFEDKKILREKLNEITWLSDQQKDVLESSRYQGWGRLSKKLLTGIVNDQGERIIDKLWNTNKNFMQIQSDDDFAKRIHEANADQMQAVDVEDVLADAYTSPQNKKAIRQVVKVVDDIQKAMGGVAPKYISIEFTRSEDRNPRRTISRQRQLENTLKDTAKSLAKSINPELLSELDNAAKSKKGLTDRLYLYFTQLGKDIYTGEPINIDELNKYDIDHILPQAFIKDNSLDNRVLVLTAVNNGKSDNVPLRMFGAKMGHFWKQLAEAGLISKRKLKNLQTDPDTISKYAMHGFIRRQLVETSQVIKLVANILGDKYRNDDTKIIEITARMNHQMRDEFGFIKNREINDYHHAFDAYLTAFLGRYLYHRYIKLRPYFVYGDFKKFREDKVTMRNFNFLHDLTDDTQEKIADAETGEVIWDRENSIQQLKDVYHYKFMLISHEVYTLRGAMFNQTVYPASDAGKRKLIPVKADRPVNVYGGYSGSADAYMAIVRIHNKKGDKYRVVGVPMRALDRLDAAKNVSDADFDRALKDVLAPQLTKTKKSRKTGEITQVIEDFEIVLGKVMYRQLMIDGDKKFMLGSSTYQYNAKQLVLSDQSVKTLASKGRLDPLQESMDYNNVYTEILDKVNQYFSLYDMNKFRHKLNLGFSKFISFPNHNVLDGNTKVSSGKREILQEILNGLHANPTFGNLKDVGITTPFGQLQQPNGILLSDETKIRYQSPTGLFERTVSLKDL

SEQ ID NO: 259 - protein, 1371 aa, Lactobacillus buchneri
MKVNNYHIGLDIGTSSIGWVAIGEDGKPLRIKGKTAIGARLFQEGNPAADRRMFRTTRRRLSRRKWRLKLLEEIFDPYITPVDSTFFARLKQSNLSPKDSRKEFKGSMLFPDLTDMQYHKDYPTIYHLRHALMTQDEKFDIRMVYLAIHHIVKYRGNFLNSTPVDSFKASKVNFVDQFKKLNELYTAINPEESFQINLANSEDIGHQFLDPSIRKFDKKKQIPKIVPVSVDDKATDKINGKIASEIINAILGYKSKLDVVVQCTPVDSKSWALKFDEEDIDAKLQKILPEMDENQQSIIAILQNLYSQVTLNQIVPNGMSLSESMIEKYNDHHDHLKLYKKIIDQLADPKKKAALKKAYSQYVGDDGKVIEQADFWSSVKKNLDDSDLSKQIMDLIDAEKFMPKQRTSQNGVIPHQLHQRELDEIIEHQSKYYPWLAEINPNKHDLHLAKYKIEELVAFRVPYYVGPMITPDDQAKSAETVFSWMERKGKEAGQITPWNFDEKVDRNASANRFIKRMTTKDTYLIGEDVLPDESLLYEKFKVLNELNMVRVNGKLLKVADKQAIFQDLFENYKHISVKKLQNYIKSKTGLPSDPEISGLSDPEYFNNSLGTYNDFKKLFGNKVDEPDLQDDFEKIVEWSTVFEDKRILREKLNEITWLSDQQKDVLESSRYQGWGRLSKKLLTGIVNDQGERIIDELWNTNKNFMQIQSDNDFAKRIHEANADQMKAVDVEDVLADAYTSPQNKKAIRQVVKVVDDIQKAMGGVAPKYISIEFTRSEDRNPRRTISRQRQLENTLKDTAKSLAKSINPELLSELDNAAKSKKGLTDRLYLYFTQLGKDIYTGKPINIDEISTYDIDHILPQAFVKDDSLNNRVLVSKAINNGKSDNVPVQLFGAKMGHFWKQLAEAGLISKRKLKNLQTDPDTISKYAMHGFIRRQLVETSQVIKLVANILGDKYRNDNTKIIEITARMNHQMRDEFGFIKNREINDYHHAFDAYLTAFLGRYLYHRYIKLRPYFVYGDFKKFKEDKVTMRNFNFLHDLTDDTQEKIADAETGEVIWDRENSIQQLKDVYHYKFMLISHEVYTLRGAMFNQTVYPASDAGKRKLIPIKADRPINVYGGYSGSADAYMAIVRIHNKKGDKYRVVGVPMRARDRLDAAKKVSDADCDRALKDVLTPQLTKTKKSRKTGEITQVVEDFEIVLGKVMYRQLMIDGDKKFMLGSSTYQYNAKQLVLSDQSVKTLASKGRLDPLQESMDYNNVYTEILDKVNQYFSLYDMNKFRHKLNLGFSKFISFPNHNVFDGNTKASSGKREILEEVLNGLHANPTFGNLKDIGITTPFGQLQQPNGILLSDEAKIRYQSPTGLFERTVSLKDL

SEQ ID NO: 260 - protein, 1361 aa, Lactobacillus casei BL23
MTKLGKPYGIGVDIGSNSIGFAAVDENSHLIRLKGKTVIGARLFEEGKAAADRRASRTTRRRLSRNRWRLSFLRDFFESHITPTGPNFFMRQKYSEISPKDKARYKYEKRLFNDRTDAEFYQQYPTMYHLRNRLLTDPSKADVREIYFAIHHILKSRGHFLTSGYAKDFNTNKVALNEIFPALQDAYAQVYPDLDITFDENKVNEFKTVLLNEKATPSDTQRALVNLLLAEDGDKDILKQQKQVLTEFAKAVVGLKTKLNVALGTEVDSSEATVWNFSLGQLDDKWAGIESAMTDEGTEILDQIRDLYRARLLNGIVPAGKTLSQAKVDDYAQHHEDLELFKDYLKQLEDDGTAKAIRQLYDRYIDGDDAKPFVREDFVKALTKEVTAHPNAKSPELLERLAQPDFMLKQRNKANGAIPVQMQQRELDQIIKNQSVYYDWLAAPNPVEKHRKSMPYQLDELLNFRIPYYVGPLVTAKEQKAAQGGVFAWMVRKDPDGNITPYNFDEKVDREASANTFIQRMKTTDTYLIGEDVLPKQSLLYQRYEVLNELNNVRVNNEKLSIEQKQQVIRELFERHNSVTIKQFAENLRAHGDYAHIPEIRGLADEKRFLSSLSTYRQLKSLLPDAIDDPAKQADIENIIAWSTVFEDAAIFKTKLKEINWLDSQTITKLSNIRYRGWGQFSHKFLNGLTLGNGHTIIQELFLSNNNLMQILTDETLQKKMTELNADKLKAANINDAIDDAYTSPSNKKALRQVLRVIEDIKRAADGQDPSWLYVETADGGGTPGKRTRARQHQLQEIYANAAHELIDSAVRGELEDKIADKADFNDRLVLYFMQGGRDIYTGTPLNIDQLSSYDIDHILPQSLIKDNSLDNRVLVHAIINREKNATFASTIYAQKMNATWRQWHEAGLISGRKLRNLQMRPDQIDKYASGFVARQLVETRQIIKLTEQIVAAQYPETKIIAVKAGLSHQLREELEFPKNRDVNHYHHAFDAFLAARIGTYLLKRFPNLQAFFTYGKFKKADVKKLRGFNFIRDITHAEDKIVVKDTGEVIWDKKRDVDELDRIYNFKRMLITHEVHFEKADLFKQTVYGAKDSKEAGGKKQLISKKKGYPVDIYGGYTQETGSYLSVVRLTKKAMYAVVKVSTRDAAKLAVAKSISEQKENETLNDIIDEKLSKISKNGKITHELFEVVLPRVGQKTLFKNSKYNLFLVNSDTYMHNYQELWMPREYQKMWKDISLSKYGDAQTEDQLDQIFGFIVSQVNSYFNLYDINQFRKKLNDAADKFATLPMRDTDDMQGKIATIGQLLIGLQANAARSDLRNLDIKTPLGLLQIPNGISLDSDTSVVYQSPTGLLEREVHLSDL

SEQ ID NO: 261 - protein, 1361 aa, Lactobacillus casei Lc-10
MTKLGKPYGIGVDIGSNSIGFAAVDENSHLIRLKGKTVIGARLFEEGKAAADRRASRTTRRRLSRNRWRLSFLRDFFESHITPTGPNFFMRQKYSEISPKDKARYKYEKRLFNDRTDAEFYQQYPTMYHLRNRLLTDPSKADVREIYFAIHHILKSRGHFLTSGYAKDFNTNKVALNEIFPALQDAYAQVYPDLDITFDENKVNEFKTVLLNEKATPSDTQRALVNLLLAEDGDKDILKQQKQVLTEFAKAVVGLKTKLNVALGTEVDSSEATVWNFSLGQLDDKWAGIESAMTDEGTEILDQIRDLYRARLLNGIVPAGNTLSQAKVDDYAQHHEDLELFKDYLKQLEDDGTAKAIRQLYDRYIDGDDAKPFVREDFVKALTKEVTAHPNAKSPELLERLAQPDFMLKQRNKANGAIPVQMQQRELDQIIKNQSVYYDWLAAPNPVEKHRKSMPYQLDELLNFRIPYYVGPLVTAKEQKAAQGGVFAWMVRKDPDGNITPYNFDEKVDREASANTFIQRMKTTDTYLIGEDVLPKQSLLYQRYEVLNELNNVRVNNEKLSIEQKQQVIRELFERHNSVTIKQFAENLRAHGDYAHIPEIRGLADEKRFLSSLSTYRQLKSLLPDAIDDPAKQADIENIIAWSTVFEDAAIFKTKLKEINWLDSQTITKLSNIRYRGWGQFSHKFLNGLTLGNGHTIIQELFLSNNNLMQILTDETLQKKMTELNADKLKAANINDAIDDAYTSPSNKKALRQVLRVIEDIKRAADGQDPSWLYVETADGGGTPGKRTRARQHQLQEIYANAAHELIDSAVRGELEDKIADKADFNDRLVLYFMQGGRDIYTGTPLNIDQLSSYDIDHILPQSLIKDNSLDNRVLVHAIINREKNATFASTIYAQKMNATWRQWHEAGLISGRKLRNLQMRPDQIDKYASGFVARQLVETRQIIKLTEQIVAAQYPETKIIAVKAGLSHQLREELEFPKNRDVNHYHHAFDAFLAARIGTYLLKRFPNLQAFFTYGKFKKADVKKLRGFNFIRDITHAEDKIVVKDTGEVIWDKKRDVDELDRIYNFKRMLITHEVHFEKADLFKQTVYGAKDSKEAGGKKQLISKKKGYPVDIYGGYTQETGSYLSVVRLTKKAMYAVVKVSTRDAAKLAVAKSISEQKENETLNDIIDEKLSKISKNGKITHELFEVVLPRVGQKTLFKNSKYNLFLVNSDTYMHNYQELWMPREYQKMWKDISLSKYGDAQTEDQLDQIFGFIVSQVNSYFNLYDINQFRKKLNDAADKFATLPMRDTDDMQGKIATIGQLLIGLQANAARSDLRNLDIKTPLGLLQIPNGISLDSDTSVVYQSPTGLLEREVHLSDL

SEQ ID NO: 262 - protein, 1363 aa, Lactobacillus casei M36
MTKLGKPYGIGVDIGSNSIGFAAVDENSHLIRLKGKTVIGARLFEEGKAAADRRASRTTRRRLSRNRWRLSFLRDFFESHITPTDPNFFMRQKYSEISPKDKARYKYEKRLFNDRTDAEFYQQYPTMYHLRNRLLTDPSKADVREIYFAIHHILKSRGHFLTSGYAKDFNTNKVALNEIFPALQDAYAQVYPDLDITFDENKVNEFKTVLLDEKATPSDTQRALVNLLLAEDGDKDILKQQKQVLTEFAKAVVGLKMKLNVALGTEVDSSEATAWNFSLGQLDDKWAGIESAMTDEGTEILDQIRDLYRARLLNGIVPAGKTLSQAKVDDYEQHHEDLELFKDYLKQLEDDGMAKVIRQLYDRYIDGDDAKPFVREDFVKALTKEVTAHPNAKSPELLERLVQPDFMLKQRNKANGAIPVQMQQRELDQIIKNQSVYYDWLAAPNPVEKHRQSMPYQLDELLNFRIPYYVGPLVTAKEQKAAQGGVFAWMVRKDPDGNITPYNFDEKVDREASANTFIQRMKTTDTYLIGEDVLPKQSLLYQSYEVLNELNNVRVNDNKLSFDQKQQVLGELFERHNTVTIKQFVDNLLAHGDYDRIPEVRGLADEKRFLSSLSTYNQLKGILHEAIDDSDKQTDIEKIIAWSTIFEDKAIFKTKLNEISWLTAGMINSLANIRYRGWGQFSHKLLNELTLSTGRTVFEELLISSHNLMQILTDEVLKQKIAELNAHELKASGIYAAIDDAYTSPSNKKALRQVLSVIDDITNAAGQAPNWLYIETADGDGVPGKRTNSRQRKIQEIYANAAQELITGSVRGELEDKIASRADFTDRLVLYFMQGGRDIYTGEPLNIDNLSSYDIDHILPQSLIKDNSLDNRVLVHPLVNREKDTIFASTRFAKQMNGMWRQWHAAGLISSRKLRNLQMRPDEIDKYASGFVARQLVETRQIIKLTEQIVADQYPDAKIIAVKAGLSSQLRKELDFPKNREVNHYHHAFDAFLAARIGTYLLKRYPNLEPFFTYGKFKKTEVKKLKSLKSFNFIRDMTHAKDKIVAKETGEIVWDNASDINELDRIYNFKRMLITHEVRFETASLFKQTLYAAKNSKNRGGSRQLIPKKKGYLVDIYGGYTQETGSYLSVVRLTKKAMYAVVKVSTRDAAKLAVAKSISEQKENETLKKIIDGKLSKTSKKGKTTHQLFEIVLPRVGQKTLFKNSKYNQFLVNSDTYMHNYQELWMPREYQRMWKDILLSNHGDAQLEGQLDQIFKFIVSQVNSYFNLYDINQFRKKIADATDKFAKLPTHDTDNARGKIATIGQLLIGLQANAMRSDLRNLDIKTPFGLLQIGTGITLDLDTSIIYQSPTGLFEREVPLTDL

SEQ ID NO: 263 - protein, 1361 aa, Lactobacillus casei group; identical to SEQ ID NO: 260

SEQ ID NO: 264 - protein, 1360 aa, Lactobacillus casei T71499
MTKLGKPYGIGVDIGSNSIGFAAVDENSHLIRLKGKTVIGARLFEEGKAAADRRASRTTRRRLSRNRWRLSFLRDFFESHITPTDPNFFMRQKYSEISPKDKARYKYEKRLFNDRTDAEFYQQYPTMYHLRTRLLTDPSKADVREIYFAIHHILKSRGHFLTPGYAKDFNTNKVALNEIFPALQDAYAQVYPDLDITFDENKVNEFKTVLLNEKATPSDTQRALVNLLLAEDGDKDILKQQKQVLTEFAKAVVGLKTKLNVALGTEVDSSEATVWNFSLGQLDDKWAGIESAMTDEGTEILDQIRDLYRARLLNGIVPAGKTLSQAKVDDYAQHHEDLELFKDYLKQLEDDGTAKAIRQLYDRYIDGDDAKPFVREDFVKALTKEVTAHPNAKSPELLERLAQPDFMLKQRNKANGAIPVQMQQRELDQIIKNQSVYYDWLAAPNPVEKHRKSMPYQLDELLNFRIPYYVGPLVTAKEQKAAQGGVFAWMVRKDPDGNITPYNFDEKVDREASANTFIQRMKTTDTYLIGEDVLPKQSLLYQSYEVLNELNNVRVNDNKLSFDQKQQVLGELFERHNTVTIKQFVDNLLAHGDYDRIPEVRGLADEKRFLSSLSTYNQLKGILHEAIDDADKQTDIENIIAWSTIFEDKAIFKTKLNEISWLNAGMINSLANIRYRGWGQFSHKLLNELTLSTGRTVFEELLISSRNLMQILTDEVLKQKIAELNAHELKASGIYAAIDDAYTSPSNKKALRQVLSVIDDITNAAGQAPNWLYIETADGDGVPGKRTNSRQRKIQEIYANAAQELITGSVRGELEDKIASRADFTDRLVLYFMQGGRDIYTGEPLNIDNLSSYDIDHILPQSLIKDNSLDNRVLVHPLVNREKDTIFASTRFAKQMNGMWRQWHAAGLISSRKLRNLQMRPDEIDKYASGFVARQLVETRQIIKLTEQIVADQYPDTKIIAVKAGLSSQLRKELDFPKNREVNHYHHAFDAFLAARIGTYLLKRYPNLEPFFTYGKFKKTEVKKLKSFNFIRDMTHAKDKIVAKETGEIVWDNASDINELDRIYNFKRMLITHEVRFETASLFKQTLYAAKNSKNRGGSRQLIPKKKGYLVDIYGGYTQETGSYLSVVRLTKKAMYAVVKVSTRDAAKLAVAKSISEQKENETLKKIIDGKLSKTSKKGKTTHQLFEIVLPRVGQKTLFKNSKYNQFLVNSDTYMHNYQELWMPREYQRMWKDILLSNHGDAQLEGQLDQIFKFIVSQVNSYFNLYDINQFRKKIADATDKFAKLPTHDTDNARGKIATIGQLLIGLQANAMRSDLRNLDIKTPFGLLQIGTGITLDLDTSIIYQSPTGLFEREVPLTDL

SEQ ID NO: 265 - protein, 1366 aa, Lactobacillus casei UCD174
MTKLGKPYGIGVDIGSNSIGFAAVDENSHLIRLKGKTVIGARLFEEGKAAAYRRASRTTRRRLSRNRWRLSFLRDFFESHITPTDPNFFMRQKYSEISPKDKARYKYEKRLFNDRTDAEFYQQYPTMYHLRTRLLTDPSKADVREIYFAIHHILKSRGHFLTPGYAKDFNTNKVALNEIFPALQDAYAQVYPDLDITFDENKVNEFKTVLLNEKATPSDTQRALVNLLLAKEGDRDILKQQKQVLTEFAKAVVGLKTKLNVALGTEVDSSEATAWNFSLGQLDDKWAGIESAMTDEGTEILDQIRDLYRARLLNGIVPAGKTLSQAKVDDYAQHHEDLELFKDYLKQLEDDGTAKAIRQLYDRYIDGDDAKPFVREDFVKALTKEVTAHPNAKSPELLERLAQPDFMLKQRNKANGAIPVQMQQRELDQIIKNQAVYYDWLAAPNPVEKHRQSMTYQLDELLNFRIPYYVGPLVTAKEQKAAQGGVFAWMVRKDPDGNITPYNFDEKVDREASANTFIQRMKTTDTYLIGEDVLPKQSLLYQSYEVLNELNNVRVNDNKLSFDQKQQVLGELFERHNTVTIKQFVDNLLAHGDYDRIPEVRGLADEKRFLSSLSTYNQLKGILHEAIDDADKQTDIENIIAWSTIFEDKAIFKTKLNEISWLNAGMINSLANIRYRGWGQFSHKLLNELTLSTGRTVFEELLISSRNLMQILTDEVLKQKIAELNAHELKASGIYAAIDDAYTSPSNKKALRQVLSVIDDITNAAGQAPNWLYIETADGDGVPGKRTNSRQRKIQEIYANAAQELITGSVRGEFEDKIASRADFTDRLVLYFMQGGRDIYTGEPLNIDNLSSYDIDHILPQSLIKDNSLDNRVLVHPLVNREKDTIFASTRFAKQMNGMWRQWHAAGLISSRKLRNLQMRPDEIDKYASGFVARQLVETRQIIKLTEQIVADQYPDTKIIAVKAGLSSQLRKELDFPKNREVNHYHHAFDAFLAARIGTYLLKRYPNLEPFFTYGKFKKTEVKKLKSLKSLKSFNFIRDMTHAKDKIVAKETGEIVWDNASDINELDRIYNFKRMLITHEVRFETASLFKQTLYAAKNSKNRGGSRQLIPKKKGYLVDIYGGYTQETGSYLSVVRLTKKAMYAVVKVSTRDAAKLAVAKSISEQKENETLKKIIDGKLSKTSKKGKTTHQLFEIVLPRVGQKTLFKNSKYNQFLVNSDTYMHNYQELWMPREYQRMWKDILLSNHGDAQIEGQLDQIFKFIVSQVNSYFNLYDINQFRKKIADATDKFAKLPTHDTDNARGKIATIGQLLIGLQANAMRSDLRNLDIKTPFGLLQIGTGITLDLDTSIIYQSPTGLFEREVPLTDL

SEQ ID NO: 266 - protein, 1389 aa, Lactobacillus casei
MIIRTYELKTITTIAILKMFQLLTGGLSMTKLGKPYGIGVDIGSNSIGFAAVDENSHLIRLKGKTVIGARLFEEGKAAADRRASRTTRRRLSRNRWRLSFLRDFFESHITPTGPNFFMRQKYSEISPKDKARYKYEKRLFNDRTDAEFYQQYPTMYHLRNRLLTDPSKADVREIYFAIHHILKSRGHFLTSGYAKDFNTNKVALNEIFPALQDAYAQVYPDLDITFDENKVNEFKTVLLNEKATPSDTQRALVNLLLAEDGDKDILKQQKQVLTEFAKAVVGLKTKLNVALGTEVDSSEATVWNFSLGQLDDKWAGIESAMTDEGTEILDQIRDLYRARLLNGIVPAGKTLSQAKVDDYAQHHEDLELFKDYLKQLEDDGTAKAIRQLYDRYIDGDDAKPFVREDFVKALTKEVTAHPNAKSPELLERLAQPDFMLKQRNKANGAIPVQMQQRELDQIIKNQSVYYDWLAAPNPVEKHRKSMPYQLDELLNFRIPYYVGPLVTAKEQKAAQGGVFAWMVRKDPDGNITPYNFDEKVDREASANTFIQRMKTTDTYLIGEDVLPKQSLLYQRYEVLNELNNVRVNNEKLSIEQKQQVIRELFERHNSVTIKQFAENLRAHGDYAHIPEIRGLADEKRFLSSLSTYRQLKSLLPDAIDDPAKQADIENIIAWSTVFEDAAIFKTKLKEINWLDSQTITKLSNIRYRGWGQFSHKFLNGLTLGNGHTIIQELFLSNNNLMQILTDETLQKKMTELNADKLKAANINDAIDDAYTSPSNKKALRQVLRVIEDIKRAADGQDPSWLYVETADGGGTPGKRTRARQHQLQEIYANAAHELIDSAVRGELEDKIADKADFNDRLVLYFMQGGRDIYTGTPLNIDQLSSYDIDHILPQSLIKDNSLDNRVLVHAIINREKNATFASTIYAQKMNATWRQWHEAGLISGRKLRNLQMRPDQIDKYASGFVARQLVETRQIIKLTEQIVAAQYPETKIIAVKAGLSHQLREELEFPKNRDVNHYHHAFDAFLAARIGTYLLKRFPNLQAFFTYGKFKKADVKKLRGFNFIRDITHAEDKIVVKDTGEVIWDKKRDVDELDRIYNFKRMLITHEVHFEKADLFKQTVYGAKDSKEAGGKKQLISKKKGYPVDIYGGYTQETGSYLSVVRLTKKAMYAVVKVSTRDAAKLAVAKSISEQKENETLNDIIDEKLSKISKNGKITHELFEVVLPRVGQKTLFKNSKYNLFLVNSDTYMHNYQELWMPREYQKMWKDISLSKYGDAQTEDQLDQIFGFIVSQVNSYFNLYDINQFRKKLNDAADKFATLPMRDTDDMQGKIATIGQLLIGLQANAARSDLRNLDIKTPLGLLQIPNGISLDSDTSVVYQSPTGLLEREVHLSDL

SEQ ID NO: 267 - protein, 1354 aa, Lactobacillus coryniformis subsp. coryniformis KCTC 3167
MTLHYNVGLDIGTNSVGYTIVDDNGKILQVKGKNGYGVRVFKEGATAAERRIFRTTHRRLKRRKWRLRLLQDFFEPYILPQDDGFFIRRKESNLVLNDRDEDTASLFNDRSDRDFYQAYPTIYHLRQALMTEKRQFDVREIYLAMHHIIKYRGHFLLNGTVNNFTNNKIDLHSDFEELNALLLNVIPELKFQIDLDHSTMFQTTLLNTTISRSGRQRDLVKSFYNGSDDKQLAKQQKSVATELLKAILGLKAKFHKLFNLDLLETTEWEFSFDAEDIDDKLAKLEPLMTENQQQVMDILQRIFAAITLNGIVPEGKTLSASKVDSYQKHKQDLKLLKAIAQHSDKKTATVLQTAYNEYINGIASKPLKQEDFYKRLTNAVKKSSDPQVADMLALIDQEKFLPKQRTKENGAIPHQLHQLELERIIDNQKDYYPWLAELNPNQARQKVAKYKLSELVAFRVPYYVGPLIEPEVQQATSNAHFAWMARKEAGPITPWNFDQKVDRNVSAERFIKRMTTKDTYLLAEDVLPLHSLLYQRFIVLNELNNVRVNGQKLTKKQKQAVYQDLFKRQPHVTKKQFKSYLVQTGEFAESSKIEGLANETSFNSGLTTENELRKIFGAQLDEARYQVDFEQIIEWATLFEDAKILRTKLAEITWLTTEQIEKLAGIRYRGWGRFSRKLLAGLRDQNGQQIIDLLWDTPNNFMVIVSQAAFSEAITKENEKLIDRRGAQDVITDLYTSPQNKKALRQVLAIVADVQKAMGGVPPQRIFIEFAREDEKNPRRSVERSRQLEKLYQTISNEFLINSEVRQELKEAVDQKVNFKDRLFLYFLQGGVDLYSGKRINIDQLSHYDIDHILPQSFIKDDSLDNRVLVSQKLNRSKSDSVPLSEFANYKFGPAMQAKWLQLKEAGLLSKRKYDNLTLDPTKLSKFAPLGFVNRQLVETRQVIKLAANLLASEETKVVTIKANMTHQVRKELDFPKNRNVNNYHHAFDAYLTAFVGIFLSKRYPKLKPYFTYGDFQKGNKLPDLKNFNFLYELKNKDRSIDSNTGEIIWDKQRDLAYMNKIYNFKKVTVVHEVLTKSGALYNQTLYKASEDKASGRGTKQLIRKKDNMPTELYGGYTGSTSAFMSIVRLWKKDKPYYKVVGIPTRMAAKLANQAQLLDYLTKKFTTRKLVKKTGDYKTTVERFELVVPKVGFNQLVIDGGQPFMLGSATYQYNARELFISKEAVKALNKQLSTHVDLVQVFDEILVQVNRWFPLYDTNGFREKLSHGRDRFMKLNDSFEEKSDTQIDVLNRILIGFHANAARTNLKILGLGTDLGFMTQQAGIRLTEKAILVHQSPSGLFERKVALRDLKGLR

SEQ ID NO: 268 - protein, 1119 aa, Lactobacillus coryniformis subsp. torquens KCTC 3535
MGYRIGLDVGITSTGYAVLKTDKNGLPYKILTLDSVIYPRAENPQTGASLAEPRRIKRGLRRRTRRTKFRKQRTQQLFIHSGLLSKPEIEQILATPQAKYSVYELRVAGLDRRLTNSELFRVLYFFIGHRGFKSNRKAELNPENEADKKQMGQLLNSIEEIRKAIAEKGYRTVGELYLKDPKYNDHKRNKGYIDGYLSTPNRQMLVDEIKQILDKQRELGNEKLTDEFYATYLLGDENRAGIFQAQRDFDEGPGAGPYAGDQIKKMVGKDIFEPTEDRAAKATYTFQYFNLLQKMTSLNYQNTTGDTWHTLNGLDRQAIIDAVFAKAEKPTKTYKPTDFGELRKLLKLPDDARFNLVNYGSLQTQKEIETVEKKTRFVDFKAYHDLVKVLPEEMWQSRQLLDHIGTALTLYSSDKRRRRYFAEELNLPAELIEKLLPLNFSKFGHLSIKSMQNIIPYLEMGQVYSEATTNTGYDFRKKQISKDTIREEITNPVVRRAVTKTIKIVEQIIRRYGKPDGINIELARELGRNFKERGDIQKRQDKNRQTNDKIAAELTELGIPVNGQNIIRYKLHKEQNGVDPYTGDQIPFERAFSEGYEVDHIIPYSISWDDSYTNKVLTSAKCNREKGNRIPMVYLANNEQRLNALTNIADNIIRNSRKRQKLLKQKLSDEELKDWKQRNINDTRFITRVLYNYFRQAIEFNPELEKKQRVLPLNGEVTSKIRSRWGFLKVREDGDLHHAIDATVIAAITPKFIQQVTKYSQHQEVKNNQALWHDAEIKDAEYAAEAQRMDADLFNKIFNGFPLPWPEFLDELLARISDNPVEMMKSRSWNTYTPIEIAKLKPVFVVRLANHKISGPAHLDTIRSAKLFDEKGIVLSRVSITKLKINKKGQVATGDGIYDPENSNNGDKVVYSAIRQALEAHNGSGELAFPDGYLEYVDHGTKKLVRKVRVAKKVSLPVRLKNKAAADNGSMVRIDVFNTGKKFVFVPIYIKDTVEQVLPNKAIARGKSLWYQITESDQFCFSLYPGDMVHIESKTGIKPKYSNKENNTSVVPIKNFYGYFDGADIATASILVRAHDSSYTARSIGIAGLLKFEKYQVDYFGRYHKVHEKKRQLFVKRDE

SEQ ID NO: 269 - protein, 1368 aa, Lactobacillus curvatus CRL 705
MSRPYNIGLDIGTSSIGWSVVDDQSKLVSVRGKYGYGVRLYDEGQTAAERRSFRTTRRRLKRRKWRLGLLREIFEPYITPIDDTFFLRQKQSNLSPKDQRKLYTQTSLFNDRTDRAFYDDYPTIYHLRYRLMTEKRQFDIREIYLAMHHIVKYRGHFLNEAPVSSFKSSEINLVAHFDRLNTIFADLFSESGFQLETDKLAEVKALLLDNQQSASNRQRQALSLIYTPSTNKAVEKQNKAIATELLKAILGLKAKFNVLTGIEAEDVKAWTLTFNAENFDEEMVKLESSLDDNAHQIIESLQELYSGVLLAGIVPENQSLSQAMITKYDDHQKHLKMLKAVREALAPGDRQRLKQAYDQYVDGQENTKAYSKEDFYGDITKALKNNPDHPIVSEIKKLIELDQFMPKQRTKDNGAIPHQLHQQELDRIIENQQQYYPWLAELNPNSKRQTVAKYKLDELVAFRVPYYVGPLITAEQQRQSSDAKFAWLIRKAEGRITPWNFDDKVDRQASANEFIKRMTTTDTYLLAEDVLPKQSLIYQRFEVLNELNGLKIDDQPITTELKQAIFTDLFMQKISVTVKNIQDYLVSEKRYASRPAITGLSDENKFNSRLSTYHDLKMIVGDAVDDVDKQADLEKCIEWSTIFEDGKIYSAKLNEIDWLTDQQRVQLAAKRYRGWGRLSAKLLTQIVNANGQRIMDLLWDTTDNFMRIVHSEDFDKLITEANQMMLAENDVQDVINDLYTSPQNKKALRQILLVVNDIQKAMKGQAPERILIEFAREDEVNSRLSVQRKRQVEQVYQNISNELLNNTEIRNELKDLSNSALSNTRLFLYFMQGGRDMYTGDSLNIDRLSTYDIDHILPQSFIKDNSLDNRVLVSQKMNRSKADQVPTDFTSVELGQKMQIQWEQMLRAGLITKKKYDNLTLNPDHISKYAMKGFINRQLVETRQVIKLATNLLMEQYGEDNIELITVKSGLTHQMRTEFDFPKNRNLNNHHHAFDAYLTAFVGLYLLKRYPKLKPYFVYGEYQKASQQDKWRNFNFLNGLKKDELVDENTEAVIWDKESGLAYLNKIYQFKKILVTRGVHENSGALFNQTLYAAKDDKASGQGGKQLIPAKQDRSTALYGGYSGKTVAYMCIVRIKNKKGDLYKVCGVETSWLAQLKQLTDEDSQKAFLEQKISPQFTKVKKQKGNIIEAVEEFEVIAPHILINQRFFDNGQELTLGSATYKHNEQELILDKTAVKLLNGALPLTQSEELAEQVYDEILDQVMHYFPLYDTNQFRAKLSTGKAAFMKLPWKSQWDGNKMVQVGQQVILDRILIGLHANAAMSDLKVLKMTTPFGMIQQSTGITLSADTQIIYQSPTGLFERRVALRDL

SEQ ID NO: 270 - protein, 1126 aa, Lactobacillus farciminis KCTC 3681
MADRISLGLDIGVASVGFSVLDIDKGKVIELGARLFSATVAAGNQDRRDMRGARRLLNRNKQRRQDTGKLFKKFGLIDDFDKGSFYDNFNQNLNPYELRVKGLTEQLTKEELAESLYQIVKHRGISYALKDADVDEGGTDYSVSLKINSQELAEKTPAQIQLQRLNDYGKVRGQVVIGDDPDNQKVLLNVFPTSAYEKEAKQIIATQQQFYPESLTDKFTEEYCQILTRKRDYFVGPGNEKSRTDYGIYKTDGRTLDNLFEELIGHDKIYPEELRASAASYTAQLFNVLNDLNNLRILNYEDGKLTKEDKEKIIAEIKNNTTTINMLNVIKKVAGCSKDDIKGFRVNEKDKPEISSMPVYRKIHKDLLKAGVDISDWPVEFIDELSFILTLNTENGEIRKQLNNRLAPKFDFLNADLIQLIIDNKDSFEIKTNNKWHRFSVKTMNKLIPEMMERPVEQMTLLNEMGLVKKDKKRFENNKYLPYKEIAKDIFNPVASKSVREALKIVNAVLKKYGHIDYLVVEMPRDKNLKEEQDNIKEFQNKNKKAKDAAFEAFVKSVGSEQRVKEALSKNRKLQMKMRLWYQQQEIDPYNGKTIDATDLINNPDKFEIDHIIPQSISFYDSINNKTLCFASMNQVKGQKTPYEFMLEGHGQSYDKFKATVMANKNFGKAKRANYLFEENVSDIETRKRFLSRNLVDTRYSSRVVLNSLQDFFREKSADTKVTVIRGKFTSNMRKHWHIDKTRETFHHHAIDASIIAATPFLRMWKKGGTIFPVKVGEESIDIETGEILDDKNFDKAMYEEPYSGFVSEIMNADDRIKFSHQVDKKMNRKVSDATIYSTRTGKLAKDKKDAEYIVAKVKDIYSVDGFKKFKKVYDKDKTKFLLYKYDPRTFSKLERIISDCPDKVEKVQTNGKVKAVDISPFEMYRRDHGMIKKYSKKGNGPAIKQLKYLDKKLGSHIDITPANANGKHVILQSLKPWRTDVYLNHETGEYEIMGIKYSDLKFNKNEGYGIKKDKYLEIKKVEEVSEKSEFMFSLYRKDRVKVQDMKTGESVELLFWSRNFSNKKYAELKPISQAENDKKLPVYGKGRLIKRLIPKNCKIWKVNTTILGDPYYLEKESDSPKDILD

SEQ ID NO: 271 - protein, 1356 aa, Lactobacillus farciminis KCTC 3681
MTKKEQPYNIGLDIGTSSVGWAVTNDNYDLLNIKKKNLWGVRLFEEAQTAKETRLNRSTRRRYRRRKNRINWLNEIFSEELAKTDPSFLIRLQNSWVSKKDPDRKRDKYNLFIDGPYTDKEYYREFPTIFHLRKELILNKDKADIRLIYLALHNILKYRGNFTYEHQKFNISNLNNNLSKELIELNQQLIKYDISFPDDCDWNHISDILIGRGNATQKSSNILKDFTLDKETKKLLKEVINLILGNVAHLNTIFKTSLTKDEEKLNFSGKDIESKLDDLDSILDDDQFTVLDAANRIYSTITLNEILNGESYFSMAKVNQYENHAIDLCKLRDMWHTTKNEEAVEQSRQAYDDYINKPKYGTKELYTSLKKFLKVALPTNLAKEAEEKISKGTYLVKPRNSENGVVPYQLNKIEMEKIIDNQSQYYPFLKENKEKLLSILSFRIPYYVGPLQSAEKNPFAWMERKSNGHARPWNFDEIVDREKSSNKFIRRMTVTDSYLVGEPVLPKNSLIYQRYEVLNELNNIRITENLKTNPIGSRLTVETKQRIYNELFKKYKKVTVKKLTKWLIAQGYYKNPILIGLSQKDEFNSTLTTYLDMKKIFGSSFMEDNKNYDQIEELIEWLTIFEDKQILNEKLHSSKYSYTPDQIKKISNMRYKGWGRLSKKILMDITTETNTPQLLQLSNYSILDLMWATNNNFISIMSNDKYDFKNYIENHNLNKNEDQNISDLVNDIHVSPALKRGITQSIKIVQEIVKFMGHAPKHIFIEVTRETKKSEITTSREKRIKRLQSKLLNKANDFKPQLREYLVPNKKIQEELKKHKNDLSSERIMLYFLQNGKSLYSEESLNINKLSDYQVDHILPRTYIPDDSLENKALVLAKENQRKADDLLLNSNVIDRNLERWTYMLNNNMIGLKKFKNLTRRVITDKDKLGFIHRQLVQTSQMVKGVANILDNMYKNQGTTCIQARANLSTAFRKALSGQDDTYHFKHPELVKNRNVNDFHHAQDAYLASFLGTYRLRRFPTNEMLLMNGEYNKFYGQVKELYSKKKKLPDSRKNGFIISPLVNGTTQYDRNTGEIIWNVGFRDKILKIFNYHQCNVTRKTEIKTGQFYDQTIYSPKNPKYKKLIAQKKDMDPNIYGGFSGDNKSSITIVKIDNNKIKPVAIPIRLINDLKDKKTLQNWLEENVKHKKSIQIIKNNVPIGQIIYSKKVGLLSLNSDREVANRQQLILPPEHSALLRLLQIPDEDLDQILAFYDKNILVEILQELITKMKKFYPFYKGEREFLIANIENFNQATTSEKVNSLEELITLLHANSTSAHLIFNNIEKKAFGRKTHGLTLNNTDFIYQSVTGLYETRIHIE

SEQ ID NO: 272 - protein, 1313 aa, Lactobacillus fermentum 28-3-CHN
MHYLDEIFAPHLQEVDENFLRRLKQSNIHPEDPAKNQAFIGKLLFPDLLKKNERGYPTLIKMRDELPVEQRAHYPVTNIYKLREAMINEDRQFDLREVYLAVHHIMKYRGHFLNNASVDKFKVGRIDFYKSFNVLNEAYEELQNGEGSFTIEPSKVEKIGQLLLDTKMRKLNRQKAVAKLLEVKVADKEETKRNKQIATAMSKLVLGYKADFATVAMANGNEWKIDLSSETSEDEIEKFREELSDAQNDILTEITSLFSQIMLNEIVPNGMSISESMMDRYWTHERQLAEVKEYLATQPASARKEFDQVYNKYIGQAPKERGFDLEKGLKKILSKKENWKEIDELLKAGDFLPKQRTSANGVIPHQMHQQELDRIIEKQAKYYPWLATENPATGERDRHQAKYELDQLVSFRIPYYVGPLVTPEVQKATSGAKFAWAKRKEDGEITPWNLWDKIDRAESAEAFIKRMTVKDTYLLNEDVLPANSLLYQKYNVLNELNNVRVNGRRLSVGIKQDIYTELFKKKKTVKVSDVASLVMAKTRGVNKPSVEGLSDPKKFNSNLATYLDLKSIVGDKVDDNRYQTDLENIIEWRSVFEDGEIFADKLTEVEWLTDQQRSALVKKRYKGWGRLSKKLLTGIVDENGQRIIDLMWNTDQNFMQIVNQPVFKEQIDQLNQKAITNDGMTLREWVESVLDGAYTSPQNKKAIWQVVRVVEDIVKAVGNAPKSISIEFARNEGNKGEITRSRRTQLQKLFEDQAHELVKDTSLTEELEKAPDLSDRYYLYFTQGGKDMYTGDPINFDEISTKYDIDHILPQSFVKDDSLDNRVLVSRAENNKKSDRVPAKLYAAKMKPYWNQLLKQGLITQRKFENLTMDVDQNIKYRSLGFVKRQLVETRQVIKLTANILGSMYQEAGTDIIETRAGLTKQLREEFDLPKVREVNDYHHAVDAYLTTFAGQYLNRRYPKLRSFFVYGEYMKFKHGSDLKLRNFNFFHELMEGDKSQGKVVDQQTGELITTRDEVAKSFDRLLNMKYMLVSKEVHDRSDQLYGATIVTAKESGKLTSPIEIKKKRPVDLYGAYTNGTSAFMTIIKFTGNKPKYKVIGVPTTSAVGLKRVGKPGSESYNQELHRIIKSNPKVKKDFEIVVPHVSYSQLIVDDDCKFTLASDTYQHPATQLVLSKESMEIIADDFKFVKENTATADEQLVRVFDEIVNQMNHYFTIFDQRSNRQKVTKARDKFVSLPTESEYEGAKKTQVGKTEVITNLLMGLHANSAQGDLKVLGLSTFGFFQSSGGLNLSEDAMIVYQSPTGLFERRICLKDI

SEQ ID NO: 273 - protein, 1381 aa, Lactobacillus fermentum ATCC 14931
MDYVKEYHIGLDIGTSSIGWAVTDSQFKLMRIKGKTAIGVRLFEEGKTAAERRTFRTTRRRLKRRKWRLHYLDKIFAPHLQEVDENFLRRLKQSNIHPEDPAKNQAFIGKLLFPDLLKKNERGYPTLIKMRDELPVEQRAHYPVTNIYKLREAMINEDRQFDLREVYLAVHHIVKYRGHFLNNASVDKFKVGRIDFDKSFNVLNEAYEELQNGEGSFTIEPSKVEKIGQLLLDTKMRKLDRQKAVAKLLEVKVADKEETKRNKQIATAMSKLVLGYKADFATVAMANGNEWKIDLSSETSEDEIEKFREELSDAQNDILTEITSLFSQIMLNAIVPNGMSISESMMDRYWTHERQLAEVKEYLATQPASARKEFDQVYNKYIGQVPKEKGFDLEKGLKKILSKKENWKEIDELLKAGDFLPKQRTSANGVIPHQMHQQELDRIIEKQAKYYPWLATENPATGERDRHQAKYELDQLVSFRIPYYVGPLVTPEVQKATSGAKFAWAKRKEDGEITPWNLWDKIDRAESAEAFIKRMTVKDTYLLNEDVLPANSLLYQKYNVLNELNNVRVNGRRLSVGIKQDIYTELFKKKKTVKAGDVASLVMAKTRGVNKPSVEGLSDPKKFNSNLATYLDLKSIMGDKVDDNRYQMDLENIIEWRSVFEDGEIFADKLTEVEWLTDEQRSALVKKRYKGWGRLSKKLLTGIVDENGQRIIDLMWNTDQNFMQIVNQPVFKEQIDQLNQKAITNDGMTLRERVESVLDDAYTSPQNKKAIWQVVRVVEDIVKAVGNAPKSISIEFARNEGNKGEITRSRRTQLQKLFEDQAHELVKDTSLTEELEKAPDLSDRYYFYFTQGGKDMYTGDPINFDEISTKYDIDHILPQSFVKDDSLDNRVLVSRAENNKKSDRVPAKLYAAKMKPYWNQLLKQGLITQRKFENLTMDVDQNIKYRSLGFVKRQLVETRQVIKLTANILGSMYQEAGTDIIETRAGLTKQLREEFDLPKVREVNDYHHAVDAYLTTFAGQYLNRRYPKLRSFFVYGEYMKFKHGSDLKLRNFNFFHELMEGDKSQGKVVDQQTGELITTRDEVAKSFDRLLNMKYMLVSKEVHDRSDQLYGATIVTAKESGKLTSPIEIKKNRPVDLYGAYTNGTSAFMTIIKFTGNKPKYKVIGVPTTSAVGLKRVGKPGSESYNQELHRIIKSNPKVKKDFEIVVPHVSYSQLIVDGDCKFTLASDTYQHPATQLVLSKESMEIIADDFKFVKENPATADEQLVRVFDEIVNQMNHYFTIFDQRSNRQKVTKARDKFVSLPTESEYEGAKKTQVGKTEVITNLLMGLHANAAQGDLKVLGLSTFGFFQSSGGLNLSEDAMIVYQSPTGLFERRICLKDI

SEQ ID NO: 274 - protein, 1327 aa, Lactobacillus florum 2F
MTEQQQPYNIGLDIGTSSIGWAVTDQNDKLLHIRGHNGIGVRLFKEGESAAERRGFRTTRRRLSRRRWRLRFLDRIFDAELAKVDPNFLARLKQSNISPLDPNKQMFGNILFDDPQFDDQKFHQQYPTIYHLRSALAQPDAPQADVRLIYLALHHMIKFRGHFLNGAAVEKFHGGQLHLESEFQELNQIFSNQQRDHVQLQTSSLDEVATILKDNQRTPSDRQRELSARLFVPVDKTIDKENKKLATELLKAVLGLKAKFDVILGVEATDPQAFKLQFSSDDFDDKIAELASELTDEANEILTVLQRLYFSLNLADILTNRQTKQVADSISTAMINRYDDHKHHLKMLKELEAQVTQEQRDGLKKAYDEYIDGDKPTIDTFYTNIKKNLDDSELANQIKSLIDLQAFMPKQRSKENGSIPHQLHQRELDQLIEVQGKYYPWLLAAKDKLDALIAFRVPYYVGPMIDPNQSDDPQNTKFAWMVRKEAGEITPWNFEEKVDKTSSATNFIKRMTTTDTYLLGEPVLPKNSLLYQQFTVLNELNKLKVNGKALTVDQKKYLYEHVCKKQRRVTLKKLSDCLMARGDFPMGAIFTGTTDQKNMNNTLKTYQDFQEIFGDEIDNPDRQVDFEKMIEWSAIFEDREIFKLKLAELNWLTSEQLERVSKKRYQGWGRLSQKLLTHIVNENGERIIDQLWNTNQNFMEIMGQDSVKQAIQEHNGANVAQTGINETIDELYTSPQNKKAIRQILLVVDDIKKAVGYAPANIMMEFAREDRDDHRLIASRARQLEKTYQEISKNWFDNESVTQELKDQIKNKTKFTDRLYLYFIQGGIDLYTGHPLNIDQLSSYDIDHILPQSFLLDNSLNNRVLTSQAENRVHKEDRLPGETVANKMRPTWKMMREQGLMTQRKYNNLTLKPDQISKFNNRGQFINRQLVETRQVIKLAADIMSQKYQADQTKVVTVKANLTHHMREKFNFYKSRNVNDYHHAFDAYLTLFVGNWLLKEYPKLQPYFVYGDFAKTGTNNLKSFNFLYRFERDHKLNDKGAIDTDKDQQLGYMKRIYRFKKMLVTKQLETNEGALYGQTLYPAPKNDKKTRNLINSKKNRPSDIYGGYSNENGSFLTLVKLKKGSKYDYRLVAVPVSKISEIKESELATIEKAIAPQFLKSSGKYRDFQVVLSKILINQKVIDDGMIFTIGSKSYKHNAKQVVLSDNSIQIVSTLSRISDKEKLITVFDEIVDITSKYLPWYKVNDVEKTKMLFRQMQDIDEMKKIIDNSLIGLHCNASITDLGKVGLSKYWGRFVLTAGISLTVDAQLIYQSPTGLFEHRVKVSDL

SEQ ID NO: 275 - protein, 1391 aa, Lactobacillus gasseri JV-V03
MTKIKNEYIVGLDVGTNSCGWVAMDFQNTILRMHGKTAIGSHLFDAGNSAADRRAFRTTRRRIKRRKWRLKLLEEIFDPYMTEVDPYFFARLKESGLSPLDKRKNVSSIVFPTALEDKKFYCNYPTIYHLRYDLMSEDKKFDLREIYLAIHHIVKYRGNFLYNTPVKDFEASKIDVKDSLEKLNELYERLDSEFTVELDSSNALEIEKIIRDKKVFKINKVKSIHQLLSLKTENKERTKLIKDVSKQIINAILGYKTKFETILLKNISKDEADDWEFKLTDVDADNKFENLIGDLNENEQEILLEIRNLANAITLSNIVEEGKTLSESMIDKYNKHSDDLELLKQVISDHPDRDKAKKLALAYDLYVNNRHGKLLQAKDVLGSKKTLSKEDFYKEVKKNLDDSKASQEILDTIALDSFMPKQRTNENGVIPYQLHQLELDRIIKNQGKYYPFLKEVNPVSSHLKEAPYKLDELIRFRVPYYVGPLISPNESTKNKQTKKNQNFAWMIRKEQGQITPWNFDQKVDRMASANKFIKRMTTKDTYLLGEDVLPANSLLYQKFTVLNELNNIKINGKRISVPLKEELYNNLFKKNSTVTTNKLKSYLKENYNLINVEIKGLADEKKFNSGLTTYNKLRNLKIFDQQLDDLNYDKDFERIIEWSTIFEDKAIYKDKLKTIKWLSDRQIDKLSKIRMQGWGQLSKKLLSQLTDNNGQTIIEQLWDSQNNFMQIVNQSDFKDAIAVANQNLLVNTSVEDILNEAYTSPANKKAIRQVVKVVDDIVKAASGKVPKQIAIEFTRDADDKAKISQTRANKLRKVYKELSNELASETIRNELERVAKDQKLLKDKYYLYFMQLGRDAYTGEPINIDDLGQYDIDHILPQSFIKDDSLENRVLVKKAVNNGKSDNVPVKLYGNRMAADLGMTIRHMWEKWKDQGLITKTKYNNLIIDPDKINKYESSGFIHRQLVETSQIIKLVSTILQSKYPDTEIIVVKARYNHYLRKHLNLYKSREVNDYHHAIDAYLSAICGNLLYQVYPYLRPFFVYGQYKKFSSDPKKEKIIYDKTRKYNFISQIFENKSNDIISLETKKKVFDKKDIIEKLKHAYNYKYMLVSRETETHDQEMFKMTVYPRLSRDTKKSRNLISKKKDMPTEIYGGYTNNSDAYMVIARINKKKGTEYRVFGVPMRELVNLRKAEKNGRYNAYLKQVLEPEIMYSKNGKKNKTISSFEIVKAKVPYKQVILDGDKKFMLASSTYVQNAKQLTLSQNSMQAITDNCENDTEEEKALEEKALIEAYDEILTNIDKYLPLFDINKFREKLHAGREKFINLSLDVKKDTILQVLNGLHDNAVMPKIKSLGLSTPLGFMQFSSGVPLSENAKLIYQSPTGLFEKRVKISDL

SEQ ID NO: 276 - protein, 1386 aa, Lactobacillus hominis CRBIP 24.179
MTKITEDYIVGLDIGTNSCGWVAMDSKNTILRMHGKTAIGSHLFDAGNSAADRRAFRTTRRRIKRRKWRLKLLEEIFDSHLAKVDPYFFARLKESGLSPLDTRKNVSSIIYPTSLEDKKFYVDNPTIYHLRYKLMTEDRKFDLREVYLAIHHIVKYRGNFLYNTPVKAFEASKIDVKGSLKKLNELYEGLDSEFNVELDSNNALEIENIIRDKKIFKINKVKEINQLLSLKTEDKERTKLMKDVSKQIVNAILGYKTKFETILLKDVSKDEADDWEFKLTDVDADNKFENLIGDLNENEQEILLVIRKLANAITLSNIVEEGKTLSESMKDKYKKHSDDLKLLKQVISDHPDRDKAKKLALAYDLYVNNRHGKILQAKDILEKKKTLSKEDFYKEIKKNLDDSKESQEILDAISLDSFMPKQRTNENGVIPYQLHQLELDKIIENQGKYYPFLKEVNPVSSHLKQAPYKLDELIRFRVPYYVGPLISPNESTKNKQTKKNQNFAWMIRKEQGQITPWNFDQKVDRMASANKFIKRMTTIDTYLLGEDVLPANSLLYQKFTVLNELNNVKINGKRISVPLKQELYNNLFKKNSTVTTNKLKSYLKENYKLIKVEIKGLSDEKKFNSGLTTYNKLKNLKIFDQQIDDPNYNKDFERIIEWSTIFEDKAIYKEKLKTIDWLSDRQIDKLSKIRMQGWGQLSKKLLSQLTDNNGQTIIEQLWDSQNNFMQIVNQADFKDAIAVANQNLLVDTSVEDILNEAYTSPANKKAIRQVVKVVDDIVKATSGKVPKQIAIEFTRDADDNAKISQSRANKLRKVYKEMSNELASETIRNELERVAKDQKLLKDKHYLYFMQLGRDAYTGELIDIDNLEQYDIDHVLPQSFIKDDSLENRVLVKKAVNNGKSDNVPVKLYGNRMATDLGMTIRHMWEKWKEQGLITKTKYNNLIIDPDKINKYESSGFIHRQLVETSQIIKLVSTILQSKYPDTEIIVVKARYNHYLRKRLNLYKSREVNDYHHAIDAYLSAICGNLLYQVYPYLRPFFVYGQYKKFSSEPEKEKIIYDKTRRYNFISQIFENKDNDIISRETKKKVFDKKDIIEKLKRAYNYKYMLVSRETETHDQEMFKMTVYPRLSRDTKKSRNLIPKKKDMPTEIYGGYTNNSDAYMIIARINKKKGPEYRVFGVPMRELVNLRKAEKNGHYKAYLKQVLEPEIMYSKNGKKNKTISSFEIVKAKVPYKQVILDGDKKFMLASSTYVQNAKQLTLSQYSMQAITDNCENDTEEEKALVEAYDEILTNIDKYLPLFDINKFREKLHAGREKFVDLPLAEKKETILQVLNGLHDNAVMPKIKSLGLSTPLGFMQFHTGVSLSENAKLIYQSPTGLFEKRLKISDL

SEQ ID NO: 277 - protein, 1369 aa, Lactobacillus iners LactinV 11V1-d
MNNNYYLGLDLGTNSVGWAVTDDHYNIIKFHGKHMWGMRLFEEAETAKDRRLHRQARRRRQRLVERINLLEELFDKEISKVDQGFFARKKESDLHFEDKTTKSEYALFNDKSYTDRDYYKQYPTIFHLIMDLIENDKKRDIRLVYLACHYLIKHRGHFIFDGKNFTVDNSFENLLDKLITYLKDNDDITLSFPKDQLINIFKNSNLNSTEKSDQLKPFFGRTNLEKGIIKLLSGGKQDLSNMFRDETLKNSNYKNLKFSDNRFDDERDGYAADLGDRIDLLILLKQIYDASILESMMSQARVSIDGHKYISSAKVCAYEKHKSDLKRLKSLIKKYLPSEYNNIFRKITEKDNYVAYSKSNITNNKREKALKYVKYVDFTKYLTKKLKTIKTQDAEDDQEIFEIKGELEKQSFLPKQRTLDNSIIPYQLHLMELKKILDNQSKYYDFLLAKDDQEGITVKDKIISLLTFRLPYYIGPVNPAVHGKFAWVKRLANGKVTPWNYKEKIDIDASHEEFIKTKLSKCSFLIGCDVLPKNSLLYQKYMVLSELNTIKFNGVNISEKLKDDIYQNLFKNIQKVTKKRLQNYIKEHENIIGDVIVTGIDNAFKQGLVSYLKFKKIIGDKVDDDRYQKVLEKIIRDITLYDECAGKKIKKEYKDSDLFTEDELNKIVKLTFNDWGRLSAELLDQLEGEDTVSGETGKIIEFMQKHNYNLMQLMSKKFTFKSKIDEINKSYYQHDKFNYKSMIDSLYVSPATKRILWQSLKVVHEISKIMKHDPEKIFIEMARSKEDHPKRKLSRKADLKQVYKDSKKQIISIIGKDKYQDLSNELDNKDDRDLRWDNLYLYYTQLGRSMYSLKPIDISELMNKNLYDQDHIFPKSKKYDDSIENRVLVEKELNVKKSDIYPISDANIIPQKIKGQVESFWKMLYDHKLIGDKKYARLIRSKAFTDDELAGFIARQLVETRQATKETADLLKRLCPKSRIVYAKAQNASIFRQKFDIPKSRTINDLHHAQDAYLNIVVGNIFDTKFTQDPRNFIKNTKDSRNYNLEKIYDYNVERNNYVAWIAPDGETNGTIANVKCNLSTKDFRVTRPSFYKKGALFNQNLSRKGSNLAPIKEHSPKSNPLKYGGYSGKNNSFFVVVAGKDNKGKDIVKLIPVNTLIYNKMLHCDYKAKQELLTSYVANNFAINNFRIVKDDIKMYSLVKIDGAYYYLVGGTDERIEVKNAMQLLLSKDSIKAVKILEKESKDQFANIKNYKDIDIKLGRTFNEVVSKYTNSVFGKSMLISDKYRKDIFKSVEKSILEFNHLDTIGKADNLLKFVTLMRPSGSAHSLKMVGLIERIRKSNVISNFNEFKLINQSVTGLFENEEDLLKL

SEQ ID NO: 278 - protein, 1391 aa, Lactobacillus jensenii 269-3
MKEIKDYIIGLDIGTNSCGYVVTDKQNNILKLKGKTAIGARLFKEGEAAADRRAFRTTRRRLARRRWRLSLLEEIFDEEMNKVDPSFFRRLKESDYSPKDRRKQFNSIVFESSEADKAFYEKYPTIYHLRNALMHDNQKHDLREIFLAVHHIVKYRGNFLREDSVKAFKAAKFTLQGEDGIGPVDKLNDLLKEIYIEAAPELATDNLSKIEDIIKDKKLYKQDKLKQIANLLPKAVDSKDKAKLNKDIAKQVANALMGYMFRLDTLFSFTDVDVKDYKLKFSDANIDESLDALTSLLTDAQIEFVLELQSIYNTIVLNEIVPDGMSLSESMVKKYDDHKKDLKLYKEYIDSLSDQKKAKQLEAAYALYVNYRKADLLAAKKLFEKKKIGDKKFVDVISNFEVFGKFVSDNLDDSELANKIKARLDLGEFLPKQRTNQNGVIPYQLHQVELTQILEKQGKYYPFLITPNPVESHRNNAPYEISELVSFRVPYYVGPLIDNQSIKDKQNKNKFAWMVRQKQGQITPWNFEEMVDTTESANQFIKRMTRKDTYLLAEDVLPKSSLIYQKFMILDELNRIKIDGKKLTSKLKHDIFEKLFKKQKSINLDNLKNYLLAEGNIPGLIEGLSDGINFNNSFSTYIDYRNIFGDEIDNPNKQADFEKMIEWSTVFEDRKIFKRKLKEITWLTPEQIKQVSSKRYSGWGRLSKKLLTQITDENGVNILQRLWNEPETLTEVLANPVIKRKISEANSLFVQINKVENILDDAYTSPQNKKAIRQVIRVVDDIIAAAHGKKPSQIAIEFARSSQNKAKVPDTRKKQLDKIYNKISSEILDSSIKNELKNLKSNKYLSKDKLFLYFKQMGRDAYTGDKLSLDQLQNYDIDHIFPRSFIKDDSLDNRVLTQKPINAKKSDYGIPALEFGNKYVPDLGITVKEMWKLWQENGLISKSKLINLCTNPKKIGSKRASGFINRQLVETSQVIKLVAIILQAEFPDTEIIEVKALQNTTLRESFHLYKNRSVNDYHHAIDAYLTTIVGNYLYQVYPKLRPYFVYGQFKKFNQEKNIDILKRLKNFNFLRQLIFNTDDNIYISGTKEIVFNKKDIIHKLETAYGYKYMNISRECYQETSSLFNQTLYAHNSSVKNSLIPKKKGLPTEIYGGYSGNKDSFFVLVKIVKKRTNLYRIVGIPTRELAKLNSSNNYNQALNKIVESKLCLKETESFKILIKRLLYGTLIVDNGQKFRIGSFKEKHNVQQLVLQLKSMKYIKFYIDGGQNYFTDVERKKLEKQDRDKCLLYVFDDIMNVVNKRFTLFDMSKYEKDGDSLREKFNCLDFNDKVSILSDLLKAFHANSDRTSITKLKITNLGRHQAGKNGITLTTNAQIIYQSPTGLFERRIKIKDL

SEQ ID NO: 279 - protein, 1395 aa, Lactobacillus jensenii 27-2-CHN
MKEIKDYIIGLDIGTNSCGYVVTDKQNNILKLKGKTAIGARLFKEGQAAADRRSFRTTRRRLARRHWRLGLLEEIFDPEMEKIDPNFFRRLKESDYSPKDSRKQFNAIVFKSIKADKRFYKKYPTIYHLRNALMHDNQKHDLREIFMAVHHIVKYRGNFLREDSVNAFKAAKFSLRGEDGIGPVDKLNDLLKEIYSEYSPELATNNLSKIEDIIKDKNLYKQDKLKQVATLLIKEADSKDKAKLNKDIAKQVANSFMGYMFRLDTLFSLTDVDVKDYKLKFSDANIDESLDDLTSLLTDAQIEFVLELQSIYNTIVLNEIVPDGMSLSESMIKKYDDHKEDLKIFKEYIDSLSDQKKAKKLLSAYNLYVNYRKSDLVEAKNLFKNKKVGDKNFADVISNFEVFGKFVSDNLDDSELANKIKARLDLGEFLPKQRTNQNGVIPYQLHQVELTQILEKQGKYYPFLITPNPVESHRNNAPYEISELVSFRVPYYVGPLIDNQSIKDKQNKNKFAWMVRQKQGQITPWNLEEMVDTTESANQFIKRMTRKDTYLLAEDVLPKSSLVYQKFMILDELNRIKIDGKKLTSELKHDIFEKLFKKQKSINLDNLKNYLLVEGNIPGLIEGLSDGINFNNSFSTYIDYRNIFGDEIDNPNKQADFEKMIEWSTVFEDRKIFKRKLKEITWLTSEQIKQVSSKRYSGWGRLSKKLLTQITDENGVNILQRLWNEPETLTEVLANPVIKRKIVEANSSFTKAKDMKDILVEAYTSPQNKKAIRQVMRVVDDIIAAAHGKKPSQIAIEFAREDQDNPQMTKSRKAQLDQIYAKISDEFLDDAVKNELKNMKDNKPLAKDKVFLYFKQMGRDAYSGEKLSLDNLQDYDIDHIYPQSFIKDDSFDNRVLVQRAYNNGKSDNVPVLLFGNKIAAGLGITIRQMWKKWLELGLISKRKFNNLITDPEKISRNMASGFVNRQLVETSQVIKLVANILQAKLPDTEIIEVKASYNSILRKEFNLYKSREVNDYHHAIDAYLTTIVGNYLYQVYPKLRPYFVYGQFKKFGKAENQEDDPVKKIKKFNFIYQLIWGKDDAICISHTNQQVFSKKDIIDKLTTAYNFKYMNISHAVYTRNNNMFKQTLFPIIERTTAKTKSLIPKKLDRPTDIYGGYSNNNDAYLALVKVDKKRGSEYRVVGIPMRAAAMLKASKNYDEDLRKVIEPMVMFDKNGKAKRGIEGFRVLVGKMPFKQAVLDGNKKFMLTGTVDTPNLKQLVLSQQNMKYILDYIEDVDCRKHKFGDKVQNPDKCLLEVFDEIIEIVDKYFELFDSRDFREKLRNSRNKFIKLEASKKADTILAILKGLQAKSTRATIKELNISDFGRIITSSISPEAQLIYQSPTGLFERRVKVKDL

SEQ ID NO: 280 - protein, 1375 aa, Lactobacillus johnsonii
MTKIKDDYIVGLDIGTDSCGWVAMNSNNDILKLQGKTAIGSRLFEGGKSAAERRLFRTTHRRIKRRRWRLKLLEEFFDPYMAEVDPYFFARLKESGLSPLDKRKTVSSIVFPTSAEDKKFYDDYPTIYHLRYKLMTEDEKFDLREVYLAIHHIIKYRGNFLYNTSVKDFKASKIDVKSSIEKLNELYENLGLDLNVEFNISNTAEIEKVLKDKQIFKRDKVKKIAELFAIKTDNKEQSKRIKDISKQVANAVLGYKTRFDTIALKEISKDELSDWNFKLSDIDADSKFEALMGNLDENEQAILLTIKELFNEVTLNGIVEDGNTLSESMINKYNDHRDDLKLLKEVIENHIDRKKAKELALAYDLYVNNRHGQLLQAKKKLGKIKPRSKEDFYKVVNKNLDDSRASKEIKKKIELDSFMPKQRTNANGVIPYQLQQLELDKIIENQSKYYPFLKEINPVSSHLKEAPYKLDELIRFRVPYYVGPLISPNESTKDIQTKKNQNFAWMIRKEEGRITPWNFDQKVDRIESANKFIKRMTTKDTYLFGEDVLPANSLLYQKFTVLNELNNIRINGKRISVDLKQEIYENLFKKHTTVTVKKLENYLKENHNLVKVEIKGLADEKKFNSGLTTYNRFKNLNIFDNQIDDLKYRNDFEKIIEWSTIFEDKSIYKEKLRSIDWLNEKQINALSNIRLQGWGRLSKKLLAQLHDHNGQTIIEQLWDSQNNFMQIVTQADFKDAIAKANQNLLVATSVEDILNNAYTSPANKKAIRQVIKVVDDIVKAASGKVPKQIAIEFTRDADENPKRSQTRGSKLQKVYKDLSTELASKTIAEELNEAIKDKKLVQDKYYLYFMQLGRDAYTGEPINIDEIQKYDIDHILPQSFIKDDALDNRVLVSRAVNNGKSDNVPVKLFGNEMAANLGMTIRKMWEEWKNIGLISKTKYNNLLTDPDHINKYKSAGFIRRQLVETSQIIKLVSTILQSRYPNTEIITVKAKYNHYLREKFDLYKSREVNDYHHAIDAYLSAICGNLLYQNYPNLRPFFVYGQYKKFSSDPDKEKAIFNKTRKFSFISQLLKNKSENSKEIAKKLKRAYQFKYMLVSRETETRDQEMFKMTVYPRFSHDTVKAPRNLIPKKMGMSPDIYGGYTNNSDAYMVIVRIDKKKGTEYKILGIPTRELVNLKKAEKEDHYKSYLKEILTPRILYNKNGKRDKKITSFEIVKSKIPYKQVIQDGDKKFMLGSSTYVYNAKQLTLSTESMKAITNNFDKDSDENDALIKAYDEILDKVDKYLPLFDINKFREKLHSGREKFIKLSLEDKKDTILKVLEGLHDNAVMTKIPTIGLSTPLGFMQFPNGVILSENAKLIYQSPTGLFKKSVKISDL

SEQ ID NO: 281 - protein, 1382 aa, Lactobacillus mucosae LM1
MDIGTNSIGWTAIDDHFSLLRVKGKNAIGVRTFKEGETAADRRGFRTARRRLSRRRWRLQFLDEFFAPYLAEVDPNFLARLKQSDISAKDPAKNQEYMGKLLFPDQEAASDGNGYPTLIQMRKAMPAEKAADFPVFNIYQLRYALMNEKRKFDLREIYLAVHHIVKYRGNFLNNTSVDKFKADQIDFNKSFETLNDLFRQVQPIAPFQIDLTKVDELGKLLLDTKQKKLDRQKAVAKLLPLIEDGTDKEIVKAHQQTAREISKLILGYKAKVGLILQNNLDQTLDMSTENSDDQLMQIAEELDDYQMELINQLSLLYSQIMLNEIVPNGETVSASMLNRYYKHRCQLKELKDYGAAQDKKTREQLDHLYAEYIGQIPKDSKFDFTKDLKKLMDKSDLGQKIKDEIEAGDYLPKQRTSANGVIPHQMHQQELDQIIENQKEYYPWLAEPNPVEKNIKNAKYKLDQLVSFRVPYYVGPMITLADQQKTSKASFAWAVRKKAGKITPWNFYDMIDREKSANNFIKRMTNKDTYLLSEDVLPASSLLYQKFTVLNELNNIRVNGRKLQPALKQAIYTDLFQKRKTVNLKTLTNFLAIHEPTLTKPKIEGLSNGRSFNSSLGTYIDMSKILGDSLDDLNYRDDIEKIIEWSTVFEDSEIYGVKLQEIQWLTNEQREKLVRKRYQGWGRLSKKLLTGITDENGQRIIDLMWDTSKNFMQIVHQPVFEEQIAELNQQLLQDADKAPLEVVDDILADAYTSPQNKKAIRQVVKVVADVVKAVGNAPASISIEFARNEDRNKELKNSRRHSIEKLYHETAEKLVKQTNLLEELGNVKDLNDRYYLYFTQAGRDMYDGTPINIDEISTHYEIDHILPQSFLKDNSLDNRVLVKKSENAAKSDRVPAKLYGAKMRAFWKQLKESQLISNRKYLNLTTDPEQVDKYQMQGFVHRQLVETRQIIKLAANIFGSLYPDSAVIETRAELTKQLREKFSLYKVRDVNDYHHAVDAYLTAFAGHYLYQRYPKLRPMFVYGDYAKIYADDLKRLRSVNLFHDLEKDQYNSGTAVNPETKEKIVDVDWLSDYVSKIQHFKYMLISKAVYTQHGQLYGATILPVAQVDKISAPIGIKDDKPVDIYGAYTNEVAAYMAIVRVNGKKPKYKVVSVPVRMLQRLKMAEQKGHDQYMQTLHDVLLRNFTSLKKNRKTGLKEAVVKDFDVLVPCVRYNQLVIDGDTKFTLGSATYQHNAKQLVLCNHSLETLANNFEYVRKHPDEADERMIMLYDDILDQVNHYFTLYDKNKFREKLNAGRDKYLKLPTFSQFENNKKTAIGKSEAIINILRGLHANAAITNLKCLGVSTPFGQLQSPSGIELSENAKLVYQSPTGLFSREVLLKDL

SEQ ID NO: 282 - protein, 1362 aa, Lactobacillus paracasei subsp. paracasei 8700:2
MTKLGKPYGIGVDIGSNSIGFAAVDENSHLIRLKGKTVIGARLFEEGKAAAKRRAGRTTRRRLSRNRWRLSFLRDFFESHITPTDPNFFMRQKYSEISPKDKARYKYEKRLFNDRTDAEFYQQYSTMYHLRNRLMTDPSRADVREIYFAIHHILKSRGHFLTPGDAKDFNTNDVALDEIFPALQDAYAQVYPDLGITFDEDKANEFKTILLNEIATSIDTQRALVKLLLAEEDDKDILKQQKQVLTEFAKAVVGLKTKLNLALGTEVDSSEATAWNFSLGQLDDKWAGIESAMTDEGTEILDQIRDLYRARLLNGIVPTGKTLSQAKVDDYTQHHEDLQLFKAYLKQLEDDGTAKAIRQLYDRYIDGDDAAPFLRENFVKALTKDVTAHPNTKSPELLERLAQPDFMLKQRNKANGAIPVQMQQRELDQIIKNQAVYYDWLAAPNPVEKHRKSMPYQLDELLNFRIPYYVGPLVTAKEQKAAQGGVFAWMVRKDPEGNITPYNFDEKVDREASANTFIQRMKTTDTYLIGEDVLPKQSLLYQRYEVLNELNNVRVNNEKLSIEQKQQVIRELFERHNSVTIKQFAENLRAHGDYAHIPEIRGLADEKRFLSSLSTYRQLKSLLPEAIDDPAKQADIENIIAWSTVFEDAAIFKTKLKEISWLGSEAITKLSNIRYRGWGQFSRKFLNGLTLGNGHTIIQELLLSTNNLMQILTDETLQKKMTELNADKLKTANINDAIDNAYTSPSNKKALRQVLRVVDDIKRAADGQDPSWLYVETADGGGTPGKRTRARQHQLQEIYANAAHELIDTAVRGELEDKISDKADFNDRLVLYFMQGGRDIYTGAPLNIDQLSSYDIDHILPQSLIKDNSLDNRVLVHAIINREKNATFASTIYAQKMNATWRQWHEAGLISGRKLRNLQMRPDQIDKYASGFVARQLVETRQIIKLTEQIVAAQYPDTKIIAVKAGLSHQLREELEFPKNRDVNHYHHAFDAFLAARIGTYLLKRFPNLQAFFTYGKFTKADVKKLRGFNFIRDITHAEDKIVAKDTGEVVWDKQRDVDELDRIYNFKRMLITHEVRFETADLFKQTVYGARDSKEAGGSKQLIPKKKGYPVDIYGGYFRENTAYLAVVKVTKKTETIFKVVKIATSQVAALNKARSRSTAEELSVLTELLKPKFSKVGKNGKITDTPFEVVLPRVPREQLFYNAKYGFFMVNSDTMFHNFQEIWVSRSDQKILQQIRKAKIDYPNVDQDLDNLFHNLADQIVKYFDLYSIAGFKEKISQSQNTFNDLAVDDTDQSVGKITVINELLKGAQANGMTGSLKVLKISTPFGFTQDKSGVLTKDSSIIYQSPTGLFERSVRLTDL

SEQ ID NO: 283 - protein, 1382 aa, Lactobacillus pentosus IG1
MKKIVNYNLGLDIGTSSIGYAAIDDQGRPVRHQNKTVMGVRLFKEGKTAESTRIFRGTRRRLSHRHWRLGYLDRIFDNEIAKVDENFLPRLKASKRARSDEKRSFRGSLLFPETGDDAYYQKYPTIYHLRYALITQKKQFDIRLIYLALHHMIKYRGNFLDTTPVSAFNIHDIDLTDQFASLNDCYQLLDMDFEFQFDLNNIEQVQKLLLDETLSKTKRQAAVSKVLVMSTGNKAFDDQQNGIASEFIKALLGGPFDLSKILNLSVADVKSWKLHMTDKDVDDTLNSLVEELDENHKQIVNLLQMIYSQVMMLGLLNGQQSISASMIERYDDHAKHWAALKKLLPALGEQEQSTIIHAYTAYTGHSRTKQLSRAEFYTKVNSILKKHENIAEATGLIELIDRNEFMPKQRDAVNGVIPHQLHQRELQLIIQNQQKYYPFLAAKAYPDADETMIEQLLSFRVPYYAGPLVDRDFINESSDQEQAMQNTKFSWLKRREAGEITPWNFEQKVDVQETANRFIKRLTTKDTYLMTEDVLPKESLIYQRFEVLNELNAIRINDRRLTAENKQLAFQQLFMAGNTKNVSIKKFRNFVFDSLKFPEKVKITGFAGQHNFLAKLSTYHDFKKIFGERVDHTDLQPDFERIVEWCTIFEDRHIYREKLKEIQWLSQSEIDQLVLIRNHGWGRLSKRLLTGIRDSDGRTVMDQLWFGTDNFMRIISQSDFAAAIANENRTQLNQHGLEDVLDSAFMSPQNKKAIRQVLKVVDDIEQTLGCPPKKVMIEFTRSPDKKKQRTVTRLEKVQQAYKAVADQLAGQSIVSELDQYANTHSKLSDTYYLYFMQLGRDLYSGKPIDIDSPMLDDDHILPRAFMKDNSLDNRALTEKPINNTKAAKFPSKVFGQQKEVTDFWKLLRRCGLMSNIKEKHLYLDPDNVDKWTRRGFIHRQLVETSQVIKIVANILNDRYQQSQTEVLEVPARLGTELRECFGWYKVREVNDYHHVFDAYLAAFIGNYLYRRYPKLQPYFVYGNFAELNKAQLKNIKSFNFLYNITDNKRVVKDIETGQTLWDDQIRQQIQHIYEYKYMLTSHEAFTQHKELYGQTIYPRREFKPGTLKAIKQDQPQELYGGYKNLTAAYMCIVKIQARKRRAAEYRVVRVATESLSALQQAKRLGVQAYERCLRQELVRNNEILRTNADPNSAPREFEVLLDRVLCHQMIISDGQKYLLGSHAYKINCMQLVLSNNSMKILSTSIVKLKQMTNEPLVQVYREILDVVNKYFTLYDVNSFRENLNQFFDKFRTLPITNEYESSKSGKKLIHRGQLETLTLILRGLHANSDKVQYGDQSTLLGGFQTKDGIKLSKDSVIQYTSPAGLNVRTVKLRDLEQKEAQK

SEQ ID NO: 284 - protein, 1361 aa, Lactobacillus pentosus KCA1
MNEPYGVGLDIGTNSVGWTVVDMNGRVRKVKGKTALGARLFKEGATAEDRRGFRTTRRRLKRVKWRLRLLREFFDQPISKIDPNFFARRKYSDISPRDPNYNGLAKTLFNDRTDKEFYDDYATIYHLRDKLMTSNRKFDIREIYLAIHHIVKYRGNFLRTGPASQYGSASLHLATSFQKLNDLFAQSEETLNLKLVTDEALLQQIQQILVRTDLSRSEQQRQIWPLMAVLTGASAAEKKRQKNVVVELSKALVGLKAKMNVVTLTEVDAAVVKDWTFTMEESQDKLPEIEEQLSEVGQQIMDEVIQLYASVNLAQLIPAGKRFSQHMVEKYKHHEKNLELLKAYIHSQSDSKRGREIRATYDRYIDGVDSKPVTQEMFYKDLMKYVEADATSNHLAAEIKDEIDSEQFMPKLRTKQNGSIPYQVQQYELDQIISHQKKYYPWLGEENPVAERRGKFPYKLDELVGFRVPYYVGPLITKEDQQATSGAGFAWMVRKADGPITPWNFDQKVDRIASATAFIQRMQTTDTYLIGEDVLPARSLIYQRFMVLNELNNMRVEDRKLAPQQKQRLYNQVFKQHQHVSVKNIQQNLMDAGEYRKTPQITGLADPKGFNSSLSTYHDFKKILLEAIADEHKRADIEKIILWSTTFEDSAIFKQKLEEVAWLTDAQRKQLSGLRYRGWGQLSHKLLTAFKDDKGRSIMDGLWETSDNFMQLRKQPAIETQIKEANQANLTDADIQDTINELYTSPQNKKAIREVMLVLDDIKNAMHGQTPSWIFVEAARGGGVAGRRTQSRSSQIVEAYKGTAKEIVSEKVQHELNEKIKAKADFNTRLVLYFLQNGRDLYTNEAINIDRLSEYDIDHILPQSLVKDDSLDNRVLTSARINREKNDTFASEKFGRKMGAQWRELHRNGLMTQRKLKHLLMRPDEISKHATDFINRQLVETRQVIKLVEELISSEYPAASIVAVKANLTHQFRQTFNFPKLREVNDYHHAFDASLTAFIGMYLLKQYPKLERFFVYGKFAKQPINLTRFNIIRKLAVAEKPIANIETGEILWDKTADIKYFEKLYNYKRLLVTHEVRENYGAMFKQTLFKASYNKSKTLVPKKNHMETSVYGGYSNQETAYLAIVRIPFKSGFKFIVVGIPTRMVAKIKHYQSLGATLNQATHKVIEPKFTKISRKTKQTVISDYEVVLPKVYLDQVVRDQVKGQMYRFSLGSDKEYHNVQELYLPLSIQQAFVGHYDESDDQRSNDLVKVYDAALKQLQRYFPLHLSRNFDQVASQAHQSFEGLKNNVQTSDKQLGKKEVLNSLFVGLHANATRSNLSVLGMSKDFGRIKSNGITLTDQAEIIYQSPTGLFERKVALKDL

SEQ ID NO: 285 - protein, 1358 aa, Lactobacillus pentosus MP-10
MNEPYGVGLDIGTNSVGWTVVDMNGRVRKVKGKTALGARLFKEGATAEDRRGFRTTRRRLKRVKWRLRLLREFFDQPISKIDPNFFARRKYSDISPRDPNYNGLAKTLFNDRTDQEFYHDYPTIYHLRDKLMTSDRKFDIREIYLAIHHIVKYRGNFLRTGPASQYGSASLHLATSFQKLNDLFAQSEESLNFKLVTDEAQLQQIQQILVRTDLSRSEQQRQIWPLMVVLMGATAAEKKRQKDFAKELANALVGLKAKLNVVTLTNVDTTVVKDWTFTLEESQDKLPEIEEQLSEVGQQIMDEVIQLYASVNLAQLIPAGKRFSQHMVEKYNHHEKNLELLKAYIHSQSDSKRGREIRATYDRYIDGVKSKPVTQEMFYKDLMKYVEADATSNHLAAEIKDEIDSEQFMPKLRTKQNGSIPYQVQQYELDQIISHQKKYYPWLGEENPVAERRGKFPYKLDELVGFRVPYYVGPLITKEDQQATSGAGFAWMVRKADGPITPWNFDQKVDRIASATAFIQRMQTTDTYLIGEDVLPARSLIYQRFMVLNELNNMRVEDQKLAPRQKQRLYNQVFKQHQHVSVKNIQQNLMDAGEYRETPKITGLADPKGFNSSLSTYHDFKKILPEAIADEHKRADIEKIILWSTTFEDSAIFKQKLEEVAWLTDAQRKQLSGLRYRGWGQLSHKLLTAFKDDNGRSVMDGLWETSDNFMQLRKQPAIETQIKEANQANLTDADIQDTINELYTSPQNKKAIREVMLVLDDIKNAMHGQTPSWIFIEAARGGGVAGRRTQSRSKQIVEAYKSTAKEIVSEKVQHELNEKIKAKADFNTRLVLYFLQNGRDLYTNEAINIDRLSEYDIDHILPQSLVKDDSLDNRVLTSARINREKNDTFASEKFGRKMGAQWRELHRNGLMTQRKLKHLLMRPDEISKHATDFINRQLVETRQVIKLVEELISSEYPSASIVAVKANLTHQFRQTFNFPKLREVNDYHHAFDASLTAFIGMYLLKQYPKLERFFVYGKFAKQPINLTRFNVIRKLAVAEEPIANIETGEILWDKTADIKCFEKLYNYKRLLVTHEVRENYGAMFDQTIFKATDSRKRLIQKKKGFATETYGGYTGRTLAYLAIVKVVTNKDTQYQVVGIPTTMVTQIQQLEASGLTSKQAVTKAIGAMINENNKKLQSYEVLLPKVRFEQVVRDEVKGHIHRFALGTDTYYHNIQELYLPLTIQRAFLGKRNDTDAQTEQNLLTVFETTLAQVNRYFPLYEMNKFKQILNSAQEKFAALPTKNKTVKNKLVTGKDGVLNNLFIGLHANASLGDLKILGMKIGFGKLQVPGGLKLTDQAEIIYQSPTGLFERKVALKDL

SEQ ID NO: 286 - protein, 1358 aa, Lactobacillus plantarum
MKEPYGVGLDIGTNSVGWTVVDASGHVRKIKGQTGIGVRLFKEGAAAADRRGFRTTRRRLKRVKWRLRLLREFFDQPISKVDINFFARRKYSDVSPRDPNYNGLEKTLFNDRSDQDFYHDYPTIYHLREALMTQHRKFDVREIYLAIHHIVKYRGNFLRNDAATAYRSGTLDLQQHFETLNHLFSQADLELNLNLTTDVALLDSIKQTLVRTDISRSDRQKLIMPLLAVLTGATTAEKKRQKAVVTEFAKALVGNKTKIDVLTLTDIDATEAKDWAFSLEENQDKLPGIEDRFSEVGQQIIDEVIRLYASVNLAQLIPEGKRFSQSMVEKYKRHGEDLKLLKAYIRSQSDAKRGRAIRATYDQYIDGVKSKQVTQEAFQKALGKFVDADVDLNSWAAQIKQAIDSEQFMPKLRTKQNGAIPYQVQQNELDQIISNQKEYYPWLGEENPVIKRRGKFPYKLDELFGFRVPYYVGPLITKEMQAATANAGFAWMVRKADGPITPWNFDDKVDRVASATAFIQRMQTTDTYLIGEEVLPARSLIYQRFMVLNELNNIRVDDGQLTPRQKQRLYNQVFKKHKRVTAKNIQDNLVAAREFPTAPRITGLADPKVFNSSLSTYHDLKQVLPEAMSDVRKQADIEKIILWSTIFEDSTIFKQKLTEISWLTAAQLKQLGQLRYRGWGQLLRKLLTGLKDDNNRSIMDGLWETNANFMQLRSQPAIENQIKSANQANLTTADLQDTINELYTSPQNKKAIREVMVVLADIKDAMHGQTPNWIFVEAARGGGVAGRRTQSRSKQIVAAYQGTAQAIVRDQVQRELKEKIKNKANFNTRLVLYFLQNGRDLYTGDAINIDRLSEYDIDHILPQSLVKDDSLDNRVLTNARINREKNDTFASEKFGKKMGAKWKEMHRMGLMTKRKLDHLLMRPDEISKYATGFINRQLVETRQVIKLVEELINAEYPSTAIVSVKANLTHQFRQTFDFPKIREVNDYHHAFDAALTAFIGTYLLKRYPKLERFFVYGKFAKQPVNLTRFNVIRKLAKTDTPITDIDTGEVLWDKLTDIKYFETLYDYKRLLVTREVSENYGAMFDQTLLKASDNGKRLIRKKQSFDTAIYGGYTGKTLAYMAIVKVSTKKDVQYQVVGVPTTMVTQIEQLEQQGMTNKQAVTKVIEPLIAANNKKMLTYEVLLPKVRFEQVVRDRIKGQTHRFALGTDTYYHNIQELYLPLTLQRAFLGKQNESEVQLNQNLLTVFDATLAQVNRYFPLYEMNKFKKILNSARDQIELLEAKNQFVKNKLVLGKQGILTNMFIGLHANASYGDLKVLGVKIDFGKLQVPGGIKLTGDAEIIYQSPTGLFERKIALKDL

SEQ ID NO: 287 - protein, 1363 aa, Lactobacillus rhamnosus
MTKLNQPYGIGLDIGSNSIGFAVVDANSHLLRLKGETAIGARLFREGQSAADRRGSRTTRRRLSRTRWRLSFLRDFFAPHITKIDPDFFLRQKYSEISPKDKDRFKYEKRLFNDRTDAEFYEDYPSMYHLRLHLMTHTHKADPREIFLAIHHILKSRGHFLTPGAAKDFNTDKVDLEDIFPALTEAYAQVYPDLELTFDLAKADDFKAKLLDEQATPSDTQKALVNLLLSSDGEKEIVKKRKQVLTEFAKAITGLKTKFNLALGTEVDEADASNWQFSMGQLDDKWSNIETSMTDQGTEIFEQIQELYRARLLNGIVPAGMSLSQAKVADYGQHKEDLELFKTYLKKLNDHELAKTIRGLYDRYINGDDAKPFLREDFVKALTKEVTAHPNEVSEQLLNRMGQANFMLKQRTKANGAIPIQLQQRELDQIIANQSKYYDWLAAPNPVEAHRWKMPYQLDELLNFHIPYYVGPLITPKQQAESGENVFAWMVRKDPSGNITPYNFDEKVDREASANTFIQRMKTTDTYLIGEDVLPKQSLLYQKYEVLNELNNVRINNECLGTDQKQRLIREVFERHSSVTIKQVADNLVAHGDFARRPEIRGLADEKRFLSSLSTYHQLKEILHEAIDDPTKLLDIENIITWSTVFEDHTIFETKLAEIEWLDPKKINELSGIRYRGWGQFSRKLLDGLKLGNGHTVIQELMLSNHNLMQILADETLKETMTELNQDKLKTDDIEDVINDAYTSPSNKKALRQVLRVVEDIKHAANGQDPSWLFIETADGTGTAGKRTQSRQKQIQTVYANAAQELIDSAVRGELEDKIADKASFTDRLVLYFMQGGRDIYTGAPLNIDQLSHYDIDHILPQSLIKDDSLDNRVLVNATINREKNNVFASTLFAGKMKATWRKWHEAGLISGRKLRNLMLRPDEIDKFAKGFVARQLVETRQIIKLTEQIAAAQYPNTKIIAVKAGLSHQLREELDFPKNRDVNHYHHAFDAFLAARIGTYLLKRYPKLAPFFTYGEFAKVDVKKFREFNFIGALTHAKKNIIAKDTGEIVWDKERDIRELDRIYNFKRMLITHEVYFETADLFKQTIYAAKDSKERGGSKQLIPKKQGYPTQVYGGYTQESGSYNALVRVAEADTTAYQVIKISAQNASKIASANLKSREKGKQLLNEIVVKQLAKRRKNWKPSANSFKIVIPRFGMGTLFQNAKYGLFMVNSDTYYRNYQELWLSRENQKLLKKLFSIKYEKTQMNHDALQVYKAIIDQVEKFFKLYDINQFRAKLSDAIERFEKLPINTDGNKIGKTETLRQILIGLQANGTRSNVKNLGIKTDLGLLQVGSGIKLDKDTQIVYQSPSGLFKRRIPLADL

SEQ ID NO: 288 - protein, 1361 aa, Lactobacillus rhamnosus HN001
MTKLNQPYGIGLDIGSNSIGFAVVDANSHLLRLKGETAIGARLFREGQSAAERRESRTTRRRLSRTRWRLSFLRDFFAPHITKIDPDFFLRQKYSEISPKDKDRFKYEKRLFNDRTDAEFYEDYPSMYHLRLHLMTHTHKADPREIFLAIHHILKSRGHFLTPGAAKDFNTDKVDLEDIFPALTEAYAQVYPDLELTFDLAKADDFKAKLLDEQATPSDTQKALVNLLLSSDGEKEIVKKRKQVLTEFAKAITGLKTKFNLALGTEVDEADASNWQFSMGQLDDKWSNIETSMTDQGTEIFEQIQEHYRARLLNGIVPAGMSLSQAKVADYGQHKEDLELFKTYLKKLNDHELAKTIRGLYDRYINGDDAKPFLREDFVKALTKEVTAHPNEVSEQLLNRMGQANFMLKQRTKANGAIPVQLQQRELDQIIANQSKYYDWLAKPNPVEKHRASKPYQLDELLTFRIPYYVGPLITPKEQAESRENVFAWMIRKDPSGNITPYNFDEKVDCPASANMFIQRMKNTDTYLIGEDVLPKRSLLYQKYEVLNELNNVSIDGRRLGADQKQRLIREVFERHSSVTIKQVAENLVAHGDFAKRPEIRGLADEKRFLSSLSTYHQLKKILHEAIDDPTKEHDIENIITWSTVFEDAAIFKTELAKISWLDSDTIKALSNIRYRGWGQFSRKLLDGLKLGNGHTVIQELMLSNHNLMQILTDETLKTTMAELNQDKLKADDIEDVINDAYTSPSNKKALRQVLRVVEDIKHAANGQDPSWLYIETADGPGTAGKRTQSRQKQIQTVYANAAQELIDSAVRGELEDKIADKASFTDRLVLYFMQGGRDIYTGAPLNIDQLSHYDIDHILPQSLIKDDSLDNRVLVNATINREKNNVFASTLFASKMAATWRKWHEAGLISGRKLRNLMLRPDEIDKFAHGFVARQLVETRQIIKLTEQIAAAQYPNTKIIAVKAGLSHQLREELDFPKNRDVNHYHHAFDAFLAARIGTYLLKRYPKLAPFFTYGEFAKVDVKKFREFNFIGALTHAKKNIVAKDTGEIVWDKERDIQELDRIYNFKRMLITHEVYFETADLFKQTIYAAKDSKERGGSKQLIPKKQGYPTQVYGGYTRENTAYLAVVKTVEKKADVYRVVRIATSQVAALKEARAQSTVKERELLKKFLTTKFTKIGKNGKKAITPFDIVIPRVPREQLFHNKRYGFFMVNSDTLMHNYQELWMSRSDQQILSKLVKSAKTVENGQVGRLFENIVEQINKYFPLYDINQFRKKLDQSKDIFSKLPLEGNGTTSGKRETIQNILTGAGTGAKNGDLKNLGIKTPFGFLQVPSGIVLDDDTTLIYQSPTGMLNRIVRLSEL

SEQ ID NO: 289 - protein, 1361 aa, Lactobacillus rhamnosus R0011
MTKLNQPYGIGLDIGSNSIGFAVVDANSHLLRLKGETAIGARLFREGQSAAERRESRTTRRRLSRTRWRLSFLRDFFAPHITKIDPDFFLRQKYSEISPKDKDRFKYEKRLFNDRTDAEFYEDYPSMYHLRLHLMTHTHKADPREIFLAIHHILKSRGHFLTPGAAKDFNTDKVDLEDIFPALTEAYAQVYPDLELTFDLAKADDFKAKLLDEQATPSDTQKALVNLLLSSDGEKEIVKKRKQVLTEFAKAITGLKTKFNLALGTEVDEADASNWQFSMGQLDDKWSNIETSMTDQGTEIFEQIQELYRARLLNGIVPAGMSLSQAKVADYGQHKEDLELFKTYLKKLNDHELAKTIRGLYDRYINGDDAKPFLREDFVKALTKEVTAHPNEVSEQLLNRMGQANFMLKQRTKANGAIPVQLQQRELDQIIANQSKYYDWLAKPNPVEKHRASKPYQLDELLTFRIPYYVGPLITPKEQAESRENVFAWMIRKDPSGNITPYNFDEKVDCPASANMFIQRMKNTDTYLIGEDVLPKRSLLYQKYEVLNELNNVSIDGRRLGADQKQRLIREVFERHSSVTIKQVAENLVAHGDFAKRPEIRGLADEKRFLSSLSTYHQLKKILHEAIDDPTKEHDIENIITWSTVFEDAAIFKTELAKISWLDSDTIKALSNIRYRGWGQFSRKLLDGLKLGNGHTVIQELMLSNHNLMQILTDETLKTTMAELNQDKLKADDIEDVINDAYTSPSNKKALRQVLRVVEDIKHAANGQDPSWLYIETADGPGTAGKRTQSRQKQIQTVYANAAQELIDSAVRGELEDKIADKASFTDRLVLYFMQGGRDIYTGAPLNIDQLSHYDIDHILPQSLIKDDSLDNRVLVNATINREKNNVFASTLFASKMAATWRKWHEAGLISGRKLRNLMLRPDEIDKFAHGFVARQLVETRQIIKLTEQIAAAQYPNTKIIAVKAGLSHQLREELDFPKNRDVNHYHHAFDAFLAARIGTYLLKRYPKLAPFFTYGEFAKVDVKKFREFNFIGALTHAKKNIVAKDTGEIVWDKERDIQELDRIYNFKRMLITHEVYFETADLFKQTIYAAKDSKERGGSKQLIPKKQGYPTQVYGGYTRENTAYLAVVKTVEKKADVYRVVRIATSQVAALKEARAQSTVKERELLKKFLTTKFTKIGKNGKKAITPFDIVIPRVPREQLFHNKRYGFFMVNSDTLMHNYQELWMSRSDQQILSKLVKSAKTVENGQVGRLFENIVEQINKYFPLYDINQFRKKLDQSKDIFSKLPLEGNGTTSGKRETIQNILTGAGTGAKNGDLKNLGIKTPFGFLQVPSGIVLDDDTTLIYQSPTGMLNRIVRLSEL

SEQ ID NO: 290 - protein, 1375 aa, Lactobacillus ruminis ATCC 25644
MRKNQEPYNIGLDIGTSSIGWSIMNDNFDLMRVKGKKGIGVRLYNEGQSAAERRMHRTARRRYGRRKWRLRLLEDFFDEHMAEVDDTFFARLKDSNISPKDDKKYRKSLLFPKSKGVTYQDDGEFYKKYPTMYHLRYALMTEHRKFDLREIYLAFHHMVKYRGNFLYDTSVDSFEAKNLDIKGKFDEINDLLSSYTDFYVDNSNAALVESILLEKNTTRKDKSKKIAKLLHVEDKEKGKNKKAKDLATQISNAVLGLKCNFHLIFELQQKYSFDLCSEKTEENIAKLSEVLDENQKMLLMILKEVQDQVMLNAFVPSGMSLSEAMMQKYDDYGEQLKIYHELEHSVSDDSAAKLRGAYRDYNDNIIKRIDGDNKKDTFYKRVKNILTKISKEYVDQDVLESCGKLKKLIDENKLFIRQRTAANGVLPHQLHQIEMRKIIDNQKEYYPWLAEPNPNEKRRVYSKYKVEELIAFRIPYYVGPLVDPNNADKNKEARFSWMVRKKDGEITPWNFYDKVDWAESANNFIERMKSKDTYLLGEDVVPKESMLYQKYEVLNELNNLRINDSGLSDSFEDVKLKQAIYNDLFKKQKIVKITDLQNYLVQNHKYLVKPKISGLADENRFLSSLSTYSDLKTIFGDKVDDRTYFNDFEKMVEYSTVFEDGHDYNQKLDEYTWLTKEEKYKIGKKRYRGWGKLSKKLLTGLRDKNNHTIMDNLWETNRNFMQIQTADEFSKQIAEENERHLKGSVSDAINDMYTSPANKKAIRQVLRVVDDIQKAMGYAPSSISLEFAREDGPSVRTVSRANRMKSIYEKYASEVSEEVMKDLDGVIKDKKGLNDRLYLYFEQQGKDMYSGHPLDFDKVISGQEYDIDHILPQAVIKDDSLDNRVLTTKALNNDVKSKGVPCRMFNGMHSFWKNLYDKGFISRRKFNNLTTNPENIDKYKMKGFVNRQLVETRQIIKLVANVLNDKYQNDDVDIIEVRAELTHDVRKHFKFYKNRNVNDYHHAFDAYLTSFIGHYLFKKYPNLRPLFDYNDFMKVSDNVFKQLRGNNFLGEFLNKTGDIISTDGNFVLNKEEMINKLNKAYAFKKILVTKEVGQRTGAMFNETRYPAPNSRKAALKYRRMPKPDSLISVKDYKNTDIYGGYSGKNDAYMVIVDMGKQYMVVGVPVRYTEKLDKLRIKHSELYRDELRKVLSRDKTLLDSKGNVKRFDIVLDRVLYGQLIEDGNELFTLGSSKYKRNFRQLFLDKQCIEILDSSATPQPTDEELIWVYDQILDKVDKYFELYDINRQRETLRKGRAAFCSLPNISMKKDDVTKKKILNEILVALHANESESNCEKIGKKVFGRLQVPGGIKLSKEAKLIYQSPTGLFERVVYLKDL

SEQ ID NO: 291 - protein, 1339 aa, Lactobacillus salivarius SMXD51
MERYHIGLDIGTSSIGWAVIGDDFKIKKKKGKNLIGTRLFNEGATAAERRGFRTQRRRLNRRKWRLKLLEEIFDPYMAEVDEYFFARLKSSNLSPKDSNKKYLGSLLFPDKSDSNFYDKYPTIYHLRRDLMEKDEKFDLREIYLAIHHIVKYRGNFLEKVPAKNYKNSGASIGFLLEEVNSLYKDIIGDESIAILNSEKFEDVEKIILDEETRNLDKQKSVGKLLVEDKKKKNIVTAFSKAIFGYKFNIEDLLLIENDEKNKLTFNDENIDDIFNELSHSLDDKQMDLLTKTREIYFKFKLNMIVPTGYTLSESMIEKYEMHKAHLKMYKEFINTLNTKDRKILKNAYSDYINTEKAKAANAQENFYKTVKKIIKDNNSDTAKKIIVLIDEGNFMPKQRTGENGVIPHQLHQIELDRIIENQAKYYPWLAEANPVEKNRKFAKYKLDELVTFRVPYYVGPLIDKTESNKNEKETKFAWMVRKAKGTITPWNFENLVDRTESANRFIKRMTSKDTYIIGEDVLPASSLLYEKFKVLNELNNIKVNEKKLDIEQKQDIYLNLFTTAKNVTKKSLATYLNCSADSISGLSDGEKFNSSLSSYIDLKAILGNIVDDCNKNEDLEKIIEYSTVFEDGNIYKEKLSEISWLTDEQIEKLSNIHFKGWGRLSKKLLTQITNENGERIIDALWNTSNNFMQIINDESIQAKLAEINGKYAGKSDLEDILSEAYTSPQNKKAIRQVMKVVEDIEKAMQCEPTSISIEFTRKKQKSRLTNTRYKKISDVYEKIADEVISEYELRKLQSELDSNANNMRDRYYLYFMQLGRDMYTGEKINIDELHQRYDIDHILPQSFIKDDSINNRVLTRKDVNNKEKSDKTAADLYAVEMSDFWRKLRKQGLITEQKYKNLLTKSDSIDKYAKKGFIKRQLVETSQVVKLVANILQDKYSDTKIIEVRAKLNSNLREEYKLIKNRAVNDYHHAIDGYLTTFIGQYLYKTYPKLRSYFVYNDFKKLDSNYLKHMKKFNFLWQLQDDKTIDIYDNVNNKFVLNVPEMKKYIQKIYNYKYMLVSKEVTTKNGAFYDQTKYNAKTVNLIPIKKNKPTNIYGGYKGKVSSYMMLVKIRKKKEVIYKFVGVPRLWTDELDRLKDTTERKILLNEIAKNSLSKTEQDFEVILDKVYYGQLIIDGNQKYTLGSSEYKYNAMQLHLSKHALEVLAKENVKDAEITDKDLVSVYEEILSVVNKYFELYDINKFRQKLNEGLEIFRKLPVYNVYESNKIKQVGKFEVLNRILMGLHANAMITDLKVLGIKTKLGQMQVNGGIKLSPDAKLIYQSPTGIFSRAVRVKDLG

SEQ ID NO: 292 - protein, 1331 aa, Lactobacillus sanfranciscensis
MNKQPYNIGLDIGTSSVGWSATELDNRLLHIKGHNGIGVRLFKEGESAADRRGFRTTRRRLARRKWRLRLLNEIFATEIAKVDPSFFARLKQSNVSPKDPNKTMFENILFDDENLDDQKFHHDYKTIYHLRQAIINHPEQKFDIRLIYLAMHHIIKYRGHFLNQANVQDFKGGKIDLEKSFKALNDIFENQGRDLRLVTDKANQYVKVLSDNAKTRSDRKKELSKLLYVPIDKDTDKNSKKVTGEILKAILGNKAKFDVIFGIEVENPKEWVLTFNSDDFDDKIEGLSSQMTDEDSEILLILKELYFALNLSDILNNSVTDKNAKTLSEAMINRYDDHKNQLAMLKKVIDSSDKKHAKELKEAYSAYIDGENNKKISFEDLKKRIQKNLVDSELSQKINDLLDHDYFLPKQRSKENGAIPHQLQQQELDQIIESQKQYYPFLAELNPNEKRSRQAKYKLDELVAFRVPYYVGPMVEVTDSNQENNGKFAWMIRKEQGEITPWNFDEKVDRTETATKFITRMTTTDTYLIGEPVLPKNSLLYQKFVVLNELNNLKINQEIITPGQKQYLYEHVMKKNKRVTLKKIADALVIKGDYPYAPEVKGTTDQKNLNNGLTTYIDLAKIFGNELDDVDREADFEKIIEWSTIFEDQHIFALKLQELKWLTEKQRNQVVKLRYQGWGKLSKELLAGLVDDNGQRIIDLLWSDNQNFMQIVNQKSFKESIADHNGAHLEEKNLKDVINDLYTSPQNKKAIRQVILVVDDIINAVGYEPANIMMEFAREDSNDHRLTNSRSRQLENVYKDITNSWFDNDSVKDELEDKIKNKDKFTDRLYLYFTQGGKDLYTGEPLNIDDLSSYDIDHILPQSFILDNSLDNRVLTSQRNNRVSKEDQLPGELFGTKMHAFWKRLKAAHLISNKKYYNLTLTPNSISKFNNQGRFINRQLVETRQVIKLAAEILHNRYSEEKGTNIVTIKANLTHHMREKFNFYKNRNVNDYHHAFDAYLTAFVGNWLLQQYPKLKPYFVYGDFAKTEINNLKSFNMLYKFEQAHQLNEKDGKIAKDADALLGYMKNVYHFKKMLVTKKLETNHGALFKQTLYPSPAHDIKKRQLIKPKDNRPTDIYGGYTHEERKYMSLVKVIGKKDNEYRMANVPLLKINKNNDIKEILKSQFSNKKFEIVLPKVLKNQLFSENGALFVIGSKGYKYNANQLVLSDLDMKLLNDLSNNKSIDEVTINQLFKNIVDSTNKYMPLYEIKNLNEVVEKFNNLEFNDKKKTITDFLLATHANPTMSNLKNIGLPSYFGRFTSGNAGIKLSENANVIYQSPTGLFSRKVKISDF

SEQ ID NO: 293 - protein, 1419 aa, Lactobacillus sp. 66c
MAKPQNYTIGLDIGTNSVGWTVTDDQNNILRIKSKKAIGARLFEEGKVAAERRSFRTTRRRLSRRKWRIKLLEELFDEEISKVDPNFFARSHESWISPKDKRERYSAIVFPTPEEDKKFHNEYPTIYHLRDRLMKDDQKHDIREIYVAIHHIMKYRGNFLHDESIETYRSGMSSLGGGDERTILNTKILDDLNDAFADNLATQGISVNSASADQINEIVTSGHLNVDSQKAIAKLLLPTTLSSDDKKQDKKIKKLATDAAKNVASAWLGYKANFAAILNIQEVDKDKKKIYSFALQGADEEDKVETLESVLSQDQIEIVDRIIRIRHAIVLGEIIPVGMTLSEAMIEKYDQHAKDLKNLKTVIRNLKDRKNAVKLQAIYDLYVNNRHADTAKAMKLAGVKKRTELLEPEEFNKSIEKLLDDSPVSAEIKKRIAEKDFLPLQRSNSNGVIPNQLHQIELDEIIKKQSKYYPFLGETNEHASADVARKAPTKLDQLLTFRVPYYVGPLITKEEQEEQDGHSFAWMIRKNPKDHEKITPWNFDEKVDRMASATQFIKRMTTKDTYLLGEDVLPSSSLKYQLFTVLNELNNLRINHKKLTREEKEQVIEDLFKKYKTVKADKFKNYWQKGHAGLDVKIQGMADPEKFNSTMSTYIDLQKIFGDQLDDAQRQNDFEKIIEYSTIFEDRKILGEKLRADFVWLSEDQIKRLCRLRLQGWGRLSLKLLTRLTDADGQNVLERLLNSNDNFMQIVKDPVIKAKIEQKNQKLLRADWSENATESILDEAYTSPQNKKAIRQVMRVVHDIVKACDGNLPAKFAIEFARSQDDDPKRTVARADRLQKIYAQISDEVVSQGVKDQLSGMKSLKDRYYLYFMQGGRDAYTGKPLNIDRLSDYDIDHIMPQSFIKDDSLDNRVLVTRAVNNQKSDNVPVLLYGNHLVADLGITIREMWDRWQKSGMISKRKLANLLTDPATLSEYRAEGFINRQLVETSQVIKLTATILQSEFPDSKIIEVPAKYNSILRKQFDLYKSREVNDYHHAIDAYLSTIVGNYLYQVYPNLRRLFVYGEFKKFSHGEEESSHQAVRRVKSMNFLDDLLRGKHGDDIYCRVTGEVIFSRKDIISKLKQAYSFKQMLVTQEVFTKKSALFDQTVYPSPARDSKTRSGLIPRKQGMDTEIYGGYSGNKDAYFVLAQVVKSKGHTLQVVGVPIRALRALANCSNYSEQLLKIVKAQVLFNKKTGKAKKGISDVRILLDKIPYRQPVLDGSAFYMLGSSTYKYNLKQISLSQQSMKYILDYIDDPNFNKHEMTKIDQQNEKECLLSVYDEILDKMDKYLSLYDINGFRKKLHVGRDKFIKLEVEKQAEAIKNVLRGFHANSDMTKLSDLGLSTSLGFMQASDGIKLSDNAVFIYQSPTGLFERRVKVSDLLK

SEQ ID NO: 294 - protein, 1289 aa, Lactobacillus versmoldensis KCTC 3814
MRRRYRRRRNRLNWLDELFADELAKIDPSFLLRMKNSWVSKKESTRKRDPYNLFIDEKYNDVDYFNQYPTIFHLRKELITEDKKVDIRLIYLAIHNIIKYRGNFTLENQNFDISQLSSNFSQQISDFFALFSDFGVIMPEDFDPDKISDILLNPNLSPSGKVSEAIATISPKTNVKAKIKIILLLLVGNNGDLKKLFDLETTEKIAVKLSSRHIDSELPIILSELNEQQENIITIANSIFGSIILKDFLGDETSISAAKVISFEDHKQDLQKLKTMWRETSNKEAVKAGKKAYEDYIGHEDSETFYKKIKKFLEKAQPVDLANKALAEIELENYLPKQRNRNNTVIPYQLNENELIAILDHQEKYYPFLKENRDKILSLLTFRIPYYVGPLQDSNNNRFSWMTRKASGAIRPWNFSEKVNVEQSSNDFIKRMRSTDTYLIGEPVLPKKSLIYQCYEVLSELNNTRVKDGSSNPKRLDVTIKQRIYNEIFKNQKSVSVKVLQNWLIKESYFKSPEISGLADKKKYLSSLSTYIDFKKIFGQRFVDDPVNSPQLEELAEWLTLFEDKKILLIKLQNSKYSYDQATINKLSTMRYQGTGKLSKKLLVDLKTTKKSIGKSGAESLSILDLMWSTKDNFMQIIHDADYTFEQQIKEFNYDTEDELTPLEKVANLHGSPALKRGLNQSIKVVADIVKFMGHDPEKIFIEFTRSDDFSKLTISRYRRIKKQYLEIAKAIKKIPAEFKDIKEYQTQLEENKGKLASERLMLYFLQCGHSLYSNKPIDLNMINSSKYHVDHILPQSYIKDDSLENKALVLASENENKIDNMLISHDIIATNLPRWQALKDQNLMGSKKFADLTRTTVTENQKKGFIQRQLVQTSQIVKNITLILNDLYKNTSCIETRATLSSEFRKAFSNFDETTYHYQFPEFVKNRDVNDFHHAQDAFLACVIGEYQLKKYPKDNLRLVYDQYSKFLDSLKKDTRKKNGRMPRYTQNGFIIGSMFNGKTYVDDNGEIIWDQKIKESIRKTFNYHQFNVVRQTIEQHGKLFNDTIQPHSDRYKLIPLKTNRDPAIYGGYNNDNNAYSVVLDVDGKKKINGIPIRIANQLKSDELDLSSWLENNIKHKKPMTILIDKVPKYQRIINEETGDLLITSANEVINNVQLFLPSMYTALISLLDSTKTEMYSKLLSNYEANILIDIYDYLLTKLKNNYPLYRKEWAKLAEHRDDFIESDLVTQASTLQQLIKFMHADPSNVNLKFGNFKGNRFGRKNGNIKLSKTDFIYESPTGLFKSIKHID

SEQ ID NO: 295 - protein, 1372 aa, Legionella pneumophila 130b
MESSQILSPIGIDLGGKFTGVCLSHLEAFAELPNHANTKYSVILIDHNNFQLSQAQRRATRHRVRNKKRNQFVKRVALQLFQHILSRDLNAKEETALCHYLNNRGYTYVDTDLDEYIKDETTINLLKELLPSESEHNFIDWFLQKMQSSEFRKILVSKVEEKKDDKELKNAVKNIKNFITGFEKNSVEGHRHRKVYFENIKSDITKDNQLDSIKKKIPSVCLSNLLGHLSNLQWKNLHRYLAKNPKQFDEQTFGNEFLRMLKNFRHLKGSQESLAVRNLIQQLEQSQDYISILEKTPPEITIPPYEARTNTGMEKDQSLLLNPEKLNNLYPNWRNLIPGIIDAHPFLEKDLEHTKLRDRKRIISPSKQDEKRDSYILQRYLDLNKKIDKFKIKKQLSFLGQGKQLPANLIETQKEMETHFNSSLVSVLIQIASAYNKEREDAAQGIWFDNAFSLCELSNINPPRKQKILPLLVGAILSEDFINNKDKWAKFKNFWNTHKIGRTSLKSKCKEIEEARKNSGNAFKIDYEEALNHPEHSNNKALIKIIQTIPDIIQAIQSHLGHNDSQALIYHNPFSLSQLYTILETKRDGFHKNCVAVTCENYWRSQKTEIDPEISYASRLPADSVRPFDGVLARMMQRLAYEIAMAKWEQIKHIPDNSSLLIPIYLEQNRFEFEESFKKIKGGSSDKTLEQAIEKQNIQWEEKFQRIINASMNICPYKGASIGGQGEIDHIYPRSLSKKHFGVIFNSEANLIYCSSQGNREKKEEHYLLEHLSPLYLKHQFGTDNVSDIKNFISQNVANIKKYISFHLLTPEQQKAARHALFLDYDDEAFKTITKFLMSQQKARVNGTQKFLGKQIMEFLSTLADSKQLQLEFSIKQITAEEVHDHRELLSKQEPKLVKSRQQSFPSHAIDATLTMSIGLKEFPQFSQELDNSWFINHLMPDEVHLNPVRSKEKYNKPNISSTPLFKDSLYAERFIPVWVKGETFAIGFSEKDLFEIKPSNKEKLFTLLKTYSTKNPGESLQELQAKSKAKWLYFPINKTLALEFLHHYFHKEIVTPDDTTVCHFINSLRYYTKKESITVKILKEPMPVLSVKFESSKKNVLGSFKHTIALPATKDWERLFNHPNFLALKANPAPNPKEFNEFIRKYFLSDNNPNSDIPNNGHNIKPQKHKAVRKVFSLPVIPGNAGTMMRIRRKDNKGQPLYQLQTIDDTPSMGIQINEDRLVKQEVLMDAYKTRNLSTIDGINNSEGQAYATFDNWLTLPVSTFKPEIIKLEMKPHSKTRRYIRITQSLADFIKTIDEALMIKPSDSIDDPLNMPNEIVCKNKLFGNELKPRDGKMKIVSTGKIVTYEFESDSTPQWIQTLYVTQLKKQP

SEQ ID NO: 296 - protein, 1372 aa, Legionella pneumophila
MESSQILSPIGIDLGGKFTGVCLSHLEAFAELPNHANTKYSVILIDHNNFQLSQAQRRATRHRVRNKKRNQFVKRVALQLFQHILSRDLNAKEETALCHYLNNRGYTYVDTDLDEYIKDETTINLLKELLPSESEHNFIDWFLQKMQSSEFRKILVSKVEEKKDDKELKNAVKNIKNFITGFEKNSVEGHRHRKVYFENIKSDITKDNQLDSIKKKIPSVCLSNLLGHLSNLQWKNLHRYLAKNPKQFDEQTFGNEFLRMLKNFRHLKGSQESLAVRNLIQQLEQSQDYISILEKTPPEITIPPYEARTNTGMEKDQSLLLNPEKLNNLYPNWRNLIPGIIDAHPFLEKDLEHTKLRDRKRIISPSKQDEKRDSYILQRYLDLNKKIDKFKIKKQLSFLGQGKQLPANLIETQKEMETHFNSSLVSVLIQIASAYNKEREDAAQGIWFDNAFSLCELSNINPPRKQKILPLLVGAILSEDFINNKDKWAKFKIFWNTHKIGRTSLKSKCKEIEEARKNSGNAFKIDYEEALNHPEHSNNKALIKIIQTIPDIIQAIQSHLGHNDSQALIYHNPFSLSQLYTILETKRDGFHKNCVAVTCENYWRSQKTEIDPEISYASRLPADSVRPFDGVLARMMQRLAYEIAMAKWEQIKHIPDNSSLLIPIYLEQNRFEFEESFKKIKGSSSDKTLEQAIEKQNIQWEEKFQRIINASMNICPYKGASIGGQGEIDHIYPRSLSKKHFGVIFNSEVNLIYCSSQGNREKKEEHYLLEHLSPLYLKHQFGTDNVSDIKNFISQNVANIKKYISFHLLTPEQQKAARHALFLDYDDEAFKTITKFLMSQQKARVNGTQKFLGKQIMEFLSTLADSKQLQLEFSIKQITAEEVHDHRELLSKQEPKLVKSRQQSFPSHAIDATLTMSIGLKEFPQFSQELDNSWFINHLMPDEVHLNPVRSKEKYNKPNISSTPLFKDSLYAERFIPVWVKGETFAIGFSEKDLFEIKPSNKEKLFTLLKTYSTKNPGESLQELQAKSKAKWLYFPINKTLALEFLHHYFHKEIVTPDDTTVCHFINSLRYYTKKESITVKILKEPMPVLSVKFESSKKNVLGSFKHTIALPATKDWERLFNHPNFLALKANPAPNPKEFNEFIRKYFLSDNNPNSDIPNNGHNIKPQKHKAVRKVFSLPVIPGNAGTMMRIRRKDNKGQPLYQLQTIDDTPSMGIQINEDRLVKQEVLMDAYKTRNLSTIDGINNSEGQAYATFDNWLTLPVSTFKPEIIKLEMKPHSKTRRYIRITQSLADFIKTIDEALMIKPSDSIDDPLNMPNEIVCKNKLFGNELKPRDGKMKIVSTGKIVTYEFESDSTPQWIQTLYVTQLKKQP

SEQ ID NO: 297 - protein, 1355 aa, Leuconostoc gelidum KCTC 3527
MTYSIGLDIGTGSVGWAVIGDDYRLKRAKGKNLIGVRLFDSATTAAERRGYRTTRRRLSRRHWRLRLLNDIFASDLAEQDENFLPRLKYSWVNPDDEQNPQLNSDVANGALFGSSETDKAFHKNYPTIYHLRHELMTDTAKHDLREVYLAIHHIVKYRGNFLNTADKINAENSFNVDLFIAALDEYNEFLETPITSIKDAQLFSDKLTDINARNKSVRVENAMSETYDDKSKIFKAILTALVGNTANFQTIFDLSDLEKDEAKNFKFKLDLEDVETKLDVVRAKLSDEQNAFLEAVLIAYDGITLKMILGDYKSISQSMIESYKSHQRDWKYIKNNVRLNEQKIEPDKNSVKFFKLDPKKLIYPSNLAYLQVISSNEDEHRKGLDYFKTAIQDADILQRIENDTFLPRQRTKRNGVLPYQLHLAELEQIIKKQSKYYPFLANIYTQDNKTENKLIGLLKFRVPYYVGPLVEAEKVTGDGKNHWLIKKELQENTPITPFNFDDVVDKDKSGEQFIKRITGTDSYLIGEPTLPENSLLYQKYNVLQELNNVRNERHQRLPIKVKQDIFEHVFKIDKNVNAKKVMAYLKLNGYGDFQIAGLSDTRTGKFNSNLSSYNYFVDLLGREKTEKIREDRLEEIIEIQTVFEDKILVAKRLSNLDFLTPQEKSKLSAKHYTGWGRLSQKLLTTQFIKTALSEAGDIIPQSHSIIDLLYYTDKNLMEILNDKTFNVRNWLTEQNKGTESGNSLYDQIDALAGPKDIKRGITQVFSIIDDIKKAMGSNPETVYLEFARETQTSRLTNSRLNRVQEIYNSPELKTEFAYLAKKLEAETKESIHDDRLYLYYLQEGRDMYTGKEIPFDQISSNYDIDHIIPQAFTKDDSLDNRVLVNRATNARKSNSPTFTNDIIDNRKSWWQSLVKRGLMSKEKFERLTDKRKTFSENQTNHFIARQLVETRQIIKNVADLIKNNYDGTQAVAIRASLTGEMRRYLDWPKNRDMNDYHHAHDALMMATVGKYVDRRGFFDNGSVSDGAGNAYNLYTKDWLVAARVGTRNDSQRVNPYGFIVGSMNSKAVRQQVNKETGEIVWGNENLDYLRHVLSYKKILVTRRLSGSSGRLYAETLFSPNPKAKLIAQKANRSVALYGGFTKAESAYTALVEFNKKGDRSYKLIKVPMAIANRVNDKQITVTAYIASLNLRDFSRVVLEHLPLGTLIRESDGSEFYAASSEYKHNAKELWAPKEILRSSKKLDKATADNLIDIFDFLTNDKTISNFKFYEKDLLHLKNVRDKFVEASDEIKIKVLSDVIYELHNDAGWRDPFKHIQEKPAWTMLQVKGGIKLSEKAAIVYQSPTGLFETITIVGE

SEQ ID NO: 298 - protein, 1337 aa, Listeria innocua ATCC 33091
MKNMKKPYTIGLDIGTNSVGWAVLTDQYDLVKRKMKIAGDSEKKQIKKNFWGVRLFDEGQTAADRRMARTARRRIERRRNRISYLQGIFAEEMSKTDANFFCRLSDSFYVDNEKRNSRHPFFATIEEEVEYHKNYPTIYHLREELVNSSEKADLRLVYLALAHIIKYRGNFLIEGALDTQNTSVDGIYKQFIQTYNQVFASGIEDGSLKKLEDNKDVAKILVEKVTRKEKLERILKLYPGEKSAGMFAQFISLIVGSKGNFQKPFDLIEKSDIECAKDSYEEDLESLLALIGDEYAELFVAAKNAYSAVVLSSIITVAETETNAKLSASMIERFDTHEEDLGELKAFIKLHLPKHYEEIFSNTEKHGYAGYIDGKTKQADFYKYMKMTLENIEGADYFIAKIEKENFLRKQRTFDNGAIPHQLHLEELEAILHQQAKYYPFLKENYDKIKSLVTFRIPYFVGPLANGQSEFAWLTRKADGEIRPWNIEEKVDFGKSAVDFIEKMTNKDTYLPKENVLPKHSLCYQKYLVYNELTKVRYINDQGKTSYFSGQEKEQIFNDLFKQKRKVKKKDLELFLRNMSHVESPTIEGLEDSFNSSYSTYHDLLKVGIKQEILDNPVNTEMLENIVKILTVFEDKRMIKEQLQQFSDVLDGVVLKKLERRHYTGWGRLSAKLLMGIRDKQSHLTILDYLMNDDGLNRNLMQLINDSNLSFKSIIEKEQVTTADKDIQSIVADLAGSPAIKKGILQSLKIVDELVSVMGYPPQTIVVEMARENQTTGKGKNNSRPRYKSLEKAIKEFGSQILKEHPTDNQELRNNRLYLYYLQNGKDMYTGQDLDIHNLSNYDIDHIVPQSFITDNSIDNLVLTSSAGNREKGDDVPPLEIVRKRKVFWEKLYQGNLMSKRKFDYLTKAERGGLTEADKARFIHRQLVETRQITKNVANILHQRFNYEKDDHGNTMKQVRIVTLKSALVSQFRKQFQLYKVRDVNDYHHAHDAYLNGVVANTLLKVYPQLEPEFVYGDYHQFDWFKANKATAKKQFYTNIMLFFAQKDRIIDENGEILWDKKYLDTVKKVMSYRQMNIVKKTEIQKGEFSKATIKPKGNSSKLISRKTNWDPMKYGGLDSPNMAYAVVIEYAKGKNKLVFEKKIIRVTIMERKAFEKDEKAFLEEQGYRQPKVLAKLPKYTLYECEEGRRRMLASANEAQKGNQQVLPNHLVTLLHHVANCEVSDGKSLDYIESNREMFAELLAHVSEFAKRYTLAEANLNKINQLFEQNKEGDIKAIAQSFVDLMAFNAMGAPASFKFFETTIERKRYNNLKELLNSTIIYQSITGLYESRKRLDD

SEQ ID NO: 299 - protein, 1334 aa, Listeria innocua
MKKPYTIGLDIGTNSVGWAVLTDQYDLVKRKMKIAGDSEKKQIKKNFWGVRLFDEGQTAADRRMARTARRRIERRRNRISYLQGIFAEEMSKTDANFFCRLSDSFYVDNEKRNSRHPFFATIEEEVEYHKNYPTIYHLREELVNSSEKADLRLVYLALAHIIKYRGNFLIEGALDTQNTSVDGIYKQFIQTYNQVFASGIEDGSLKKLEDNKDVAKILVEKVTRKEKLERILKLYPGEKSAGMFAQFISLIVGSKGNFQKPFDLIEKSDIECAKDSYEEDLESLLALIGDEYAELFVAAKNAYSAVVLSSIITVAETETNAKLSASMIERFDTHEEDLGELKAFIKLHLPKHYEEIFSNTEKHGYAGYIDGKTKQADFYKYMKMTLENIEGADYFIAKIEKENFLRKQRTFDNGAIPHQLHLEELEAILHQQAKYYPFLKENYDKIKSLVTFRIPYFVGPLANGQSEFAWLTRKADGEIRPWNIEEKVDFGKSAVDFIEKMTNKDTYLPKENVLPKHSLCYQKYLVYNELTKVRYINDQGKTSYFSGQEKEQIFNDLFKQKRKVKKKDLELFLRNMSHVESPTIEGLEDSFNSSYSTYHDLLKVGIKQEILDNPVNTEMLENIVKILTVFEDKRMIKEQLQQFSDVLDGVVLKKLERRHYTGWGRLSAKLLMGIRDKQSHLTILDYLMNDDGLNRNLMQLINDSNLSFKSIIEKEQVTTADKDIQSIVADLAGSPAIKKGILQSLKIVDELVSVMGYPPQTIVVEMARENQTTGKGKNNSRPRYKSLEKAIKEFGSQILKEHPTDNQELRNNRLYLYYLQNGKDMYTGQDLDIHNLSNYDIDHIVPQSFITDNSIDNLVLTSSAGNREKGDDVPPLEIVRKRKVFWEKLYQGNLMSKRKFDYLTKAERGGLTEADKARFIHRQLVETRQITKNVANILHQRFNYEKDDHGNTMKQVRIVTLKSALVSQFRKQFQLYKVRDVNDYHHAHDAYLNGVVANTLLKVYPQLEPEFVYGDYHQFDWFKANKATAKKQFYTNIMLFFAQKDRIIDENGEILWDKKYLDTVKKVMSYRQMNIVKKTEIQKGEFSKATIKPKGNSSKLIPRKTNWDPMKYGGLDSPNMAYAVVIEYAKGKNKLVFEKKIIRVTIMERKAFEKDEKAFLEEQGYRQPKVLAKLPKYTLYECEEGRRRMLASANEAQKGNQQVLPNHLVTLLHHAANCEVSDGKSLDYIESNREMFAELLAHVSEFAKRYTLAEANLNKINQLFEQNKEGDIKAIAQSFVDLMAFNAMGAPASFKFFETTIERKRYNNLKELLNSTIIYQSITGLYESRKRLDD

SEQ ID NO: 300 - protein, 1334 aa, Listeria monocytogenes
MKNPYTIGLDIGTNSVGWAVLTNQYDLVKRKMKVAGNSDKKQIKKNFWGVRLFDDGQTAVDRRMNRTARRRIERRRNRISYLQEIFAVEMANIDANFFCRLNDSFYVDSEKRNSRHPFFATIEEEVAYHKNYRTIYHLREELVNSSEKADLRLVYLALAHIIKYRGNFLIEGALDTKNTSVDGVYEQFIQTYNQVFMSNIEEGTLAKVEENIEVANILAGKFTRREKFERILQLYPGEKSTGMFAQFISLIVGSKGNFQKVFDLIEKTDIECAKDSYEEDLEALLAIIGDEYAELFVAAKNTYNAVVLSSIITVTATETNAKLSASMIERFDAHEKDLGELKAFIKLHLPKQYQEIFNNAAIDGYAGYIDGKTKQVDFYKYLKTILENIEGADYFIAKIEEENFLRKQRTFDNGAIPHQLHLEELEAIIHQQAKYYPFLREDYEKIKSLVTFRIPYFVGPLAKGQSEFAWLTRKADGEIRPWNIEEKVDFGKSAVDFIEKMTNKDTYLPKENVLPKHSLCYQKYMVYNELTKVRYIDDQGKTNYFSGQEKQQIFNDLFKQKRKVKKKDLELFLRNINHIESPTIEGLEDSFNASYATYHDLLKVGMKQEILDNPLNTEMLEDIVKILTVFEDKPMIKEQLQQFSDVLDGGVLKKLERRHYTGWGRLSAKLLVGIREKQSHLTILDYLMNDDGLNRNLMQLINDSNLSFKSIIEKEQVSTTDKDLQSIVADLAGSPAIKKGILQSLKIVDELVSIMGYPPQTIVVEMARENQTTGKGKNNSKPRYKSLEKAIKEFGSKILKEHPTDNQELKNNRLYLYYLQNGKDMYTGQELDIHNLSNYDIDHIVPQSFITDNSIDNLVLTSSAGNREKGGDVPPLEIVRKRKVFWEKLYQGNLMSKRKFDYLTKAERGGLTDADKARFIHRQLVETRQITKNVANILHQRFNNETDNHGNTMEQVRIVTLKSALVSQFRKQFQLYKVREVNDYHHAHDAYLNGVVANTLLKVYPQLEPEFVYGEYHQFDWFKANKATAKKQFYTNIMLFFGQKERIIDENGEILWDKKYLETIKKVLDYRQMNIVKKTEIQKGEFSKATIKPKGNSSKLIPRKENWDPMKYGGLDSPNMAYAVIIEHAKGKKKLIFEKKIIRITIMERKMFEKDEEAFLEEKGYRHPKVLTKLPKYTLYECEKGRRRMLASANEAQKGNQLVLSNHLVSLLYHAKNCEASDGKSLKYIEAHRETFSELLAQVSEFATRYTLADANLSKINNLFEQNKEGDIQAIAQSFVDLMAFNAMGAPASFKFFEATIDRKRYTNLKELLSSTIIYQSITGLYESRKRLDD

SEQ ID NO: 301 - protein, 1334 aa, Listeria monocytogenes FSL J1-194
MKNPYTIGLDIGTNSVGWAVLTDQYDLVKRKMKVAGNSDKKQIKKNFWGVRLFDDGQTAVDRRMNRTARRRIERRRNRISYLQEIFAVEMANIDANFFCRLNDSFYVDSEKRNSRHPFFATIEEEVAYHKNYRTIYHLREELVNSSEKADLRLVYLALAHIIKYRGNFLIEGALDTKNTSVDEVYKQFIQTYNQVFMSNIEEGALAKVEENTEVASILAGKFTRREKFERILRLYPGEKSTGMFAQFISLIVGNKGNFQKVFNLVEKTDIECAKDSYEEDLEALLAIIGDEYAELFVAAKNTYNAVVLSSIITVTATETNAKLSASMIERFDAHEKELGELKAFIKLHLPKQYQEIFNNAEIDGYAGYIDGKTKQVDFYKYLKTTLENVEGADYFITKIEEENFLRKQRTFDNGVIPHQLHLEELEAILHQQAKYYPFLREGYDKIKSLVTFRIPYFVGPLANGQSEFAWLTRKDDGEIRPWNIEEKVDFGKSAVDFIEKMTNKDTYLPKENVLPKHSLCYQKYMVYNELTKIRYIDDQGKTNYFSGREKQQIFNDLFKQKRKVKKKDLELFLRNINHIESPTIEGLEDSFNASYATYHDLLKVGLKQEILDNPLNTEILEDIVKILTVFEDKRMIKEQLEQFSDVLDGVVLKKLERRHYTGWGRLSAKLLVGIRDKQSHLTILDYLMNDDGLNRNLMQLINDSNLSFKSIIEKEQVSTTDKDLQSIVADLAGSPAIKKGILQSLKIVDELVSIMGYPPQTIVVEMARENQTTGKGKNNSKPRYKSLEKAIKDFGSQILKEHPTDNQELKNNRLYLYYLQNGKDIYTGQELDIHNLSNYDIDHIVPQSFITDNSIDNLVLTSSAGNREKGGDVPPLEIVRKRKVFWEKLYQGNLMSKRKFDYLTKAERGGLTEADKARFIHRQLVETRQITKNVANILHQRFNKETDNHGNTMEQVRIVTLKSALVSQFRKQFQLYKVREVNDYHHAHDAYLNGVVANTLLKVYPQLEPEFVYGEYHQFDWFKANKATAKKQFYTNIMLFFAQKERIIDENGEILWDKKYLETIKKVLDYRQINIVKKTEIQKGEFSKATIKPKGNSSKLIPRKENWDPMKYGGLDSPNMAYAVIIEHAKGKKKIVIEKKLIQINIMERKMFEKDEEAFLEEKGYHQPKVLTKLPKYTLYECEKGRRRMLSSANEAQKGNQLVLSNHLVSLLYHAKNCEASDGKSLKYIEAHRETFSELLAQVSEFATKYTLADANLSKINNLFEQNKEGDIKAIAQSFVDLMAFNAMGAPASFKFFEATIDRKRYTNLKELLSSTIIYQSITGLYESRKRLDD

SEQ ID NO: 302 - protein, 1334 aa, Listeria monocytogenes FSL J1-208
MKNPYTIGLDIGTNSVGWAVLTDQYDLVKRKMKVAGNSDKKQIKKNFWGVRLFDEGETAADRRMNRTARRRIERRRNRISYLQEIFALEMANIDANFFCRLNDSFYVDSEKRNSRHPFFATIEEEVAYHKNYRTIYHLREELVNSSEKADLRLVYLALAHIIKYRGNFLIEGALDTKNTSVDGVYKQFIQTYNQVFISNIEEGTLAKMEENTTVADILAGKFTRKEKLERILQLYPGEKSTGMFAQFISLIVGSKGNFQKVFDLVEKTDIECAKDSYEEDLEALLAIIGDEYAELFVAAKNTYNAVVLSSIITVTDTETNAKLSASMIERFDAHEKDLSELKAFIKLHLPKQYEEIFSNVAIDGYAGYIDGKTKQVDFYKYLKTLLENIEGADYFIAKIEEENFLRKQRTFDNGAIPHQLHLEELEAILHQQAKYYPFLKEAYDKIKSLVTFRIPYFVGPLANGQSDFAWLTRKADGEIRPWNIEEKVDFGKSAVDFIEKMTNKDTYLPKENVLPKHSLYYQKYMVYNELTKVRYIDDQGKTNYFSGQEKQQIFNDYFKQKRKVSKKDLEQFLRNMSHIESPTIEGLEDSFNSSYATYHDLLKVGIKQEVLENPLNTEMLEDIVKILTVFEDKRMIKEQLQQFSDVLDGAVLKKLERRHYTGWGRLSAKLLVGIRDKQSHLTILDYLMNDDGLNRNLMQLINDSNLSFKSIIEKEQVSTTDKDLQSIVADLAGSPAIKKGILQSLKIVDELVSIMGYPPQTIVVEMARENQTTVKGKNNSRPRYKSLEKAIKEFGSQILKEHPTDNQELRNNRLYLYYLQNGKDMYTGQELDIHNLSNYDIDHIVPQSFITDNSIDNLVLTSSAGNREKGDDVPPLEIVRKRKVFWEKLFQGNLMSKRKFDYLTKAERGGLTEADKATFIHRQLVETRQITKNVANILHQRFNNETDNHGNNMEQVRIVMLKSALVSQFRKQFQLYKVREVNDYHHAHDAYLNGVVANTLLKVYPQLEPEFVYGEYHQFDWFKANKATAKKQFYTNIMLFFAQKERIIDENGEILWDKKYLETIKKVLDYRQMNIVKKTEIQKGEFSKATIKPKGNSSKLIPRKENWDPMKYGGLDSPNMAYAVIIEHAKGKKKVVFEKKIIRITIMERKAFEKDEKSFLEKQGYRQPKVLTKLPKYTLYECENGRRRMLASANEAQKGNQQVLKGQLITLLHHAKNCEASDGKSLDYIESNREMFGELLAHVSEFAKRYTLADANLSKINQLFEQNKDNDIKVIAQSFVNLMAFNAMGAPASFKFFEATIERKRYTNLKELLSATIIYQSITGLYEARKRLDG

SEQ ID NO: 303 - protein, 1334 aa, Listeria monocytogenes FSL N3-165
MKKPYTIGLDIGTNSVGWAVLTDQYDLVKRKMKISGDSEKKQIKKNFWGVRLFEKGETAAKRRMSRTARRRIERRRNRISYLQEIFAIQMNEVDDNFFNRLKESFYAESDKKYNRHPFFGTVEEEVAYYKDFPTIYHLRKELIDSQKKADLRLVYLALAHIIKYRGHFLIEGALDTKNTSIDEMFKQFLQIYNQVFANDIEEASLKKTEKNQEVAQILAEKFTRKDKLDKILSLYPGEKTTGVFAQFVNIIVGSTGKFKKHFNLHEKKDINCAEDTYDTDLESLLAIIGDEFAEVFVAAKNAYNAVVLSNIITVTDSTTRAKLSASLIERFENHKEDLKKMKRFVRTYLPEKYDEIFDDTEKHGYAGYISGKTKQADFYKYMKATLEKIEGADYFIAKIEEENFLRKQRTFDNGVIPHQLHLEELEAILHQQAKYYPFLREDYEKIKSLVTFRIPYFVGPLAKGQSEFAWLTRKADGEIRPWNIEEKVDFGKSAVDFIEKMTNKDTYLPKENVLPKHSLCYQKYMVYNELTKVRYIDDQGKTNYFSGQEKQQIFNDLFKQKRKVKKKDLELFLRNINQIESPTIEGLEDSFNASYATYHDLLKVGMKQEILDNPLNTEMLEDIVKILTVFEDKRMIKEQLQQFSDVLDGTVLKKLERRHYTGWGRLSAKLLVGIRDKQSHLTILDYLMNDDGLNRNLMQLINDSNLSFKSIIEKEQVSTTDKDLQSIVAELAGSPAIKKGILQSLKIVDELVSVMGYPPQTIVVEMARENQTTNKGKNNSKPRYKSLEKAIKEFGSQILKEHPTDNQELKNNRLYLYYLQNGKDMYTGQELDIHNLSNYDIDHIVPQSFITDNSVDNLVLTSSAGNREKGDNVPPLEIVQKRKIFWEKLYQGNLMSKRKFDYLTKAERGGLTEADKARFIHRQLVETRQITKNVANILHQRFNYKTDGNKDTMETVRIVTLKSALVSQFRKQFQFYKVREVNDYHHAHDAYLNGVVANTLLKVYPQLEPEFVYGEYHQFGWFKANKATAKKQFYTNIMLFFAQKDRIIDENGEILWDKRYLETVKKVLGYRQMNIVKKTEIQKGEFSNVTPNPKGKSNKLIPRKKDWDPIKYGGFDGSKMAYAIIIEYEKQKRKVRIEKKLIQINIMEREAFEKDEKTFLEEKGYHQPKVLIKVPKYTLYECKNGRRRMLGSANEAHKGNQMLLPNHLMALLYHAEKYEAIDGESLAYIEVHRALFDELLAYISEFARKYTLSNDRLDEINMLYERNKDGDVKSIAESFVSLKKFNAFGVHQDFSFFGTKIERKRDRKLNELLNSTIIYQSITGLYESRKRLDN

SEQ ID NO: 304 - protein, 1334 aa, Listeria monocytogenes FSL R2-503
MKNPYTIGLDIGTNSVGWAVLTDQYDLVKRKMKVAGNSDKKQIKKNFWGVRLFDDGQTAVDRRMNRTARRRIERRRNRISYLQEIFAVEMANIDANFFCRLNDSFYVDSEKRNSRHPFFATIEEEVAYHKNYRTIYHLREELVNSSEKADLRLVYLALAHIIKYRGNFLIEGALDTKNTSVDEVYKQFIQTYNQVFMSNIEEGALAKVEENTEVASILAGKFTRREKFERILRLYPGEKSTGMFAQFISLIVGNKGNFQKVFNLVEKTDIECAKDSYEEDLEALLAIIGDEYAELFVAAKNTYNAVVLSSIITVTATETNAKLSASMIERFDAHEKELGELKAFIKLHLPKQYQEIFNNAEIDGYAGYIDGKTKQVDFYKYLKTTLENVEGADYFITKIEEENFLRKQRTFDNGVIPHQLHLEELEAILHQQAKYYPFLREGYDKIKSLVTFRIPYFVGPLANGQSEFAWLTRKDDGEIRPWNIEEKVDFGKSAVDFIEKMTNKDTYLPKENVLPKHSLCYQKYMVYNELTKIRYIDDQGKTNYFSGREKQQIFNDLFKQKRKVKKKDLELFLRNINHIESPTIEGLEDSFNASYATYHDLLKVGLKQEILDNPLNTEILEDIVKILTVFEDKRMIKEQLEQFSDVLDGVVLKKLERRHYTGWGRLSAKLLVGIRDKQSHLTILDYLMNDDGLNRNLMQLINDSNLSFKSIIEKEQVSTTDKDLQSIVADLAGSPAIKKGILQSLKIVDELVSIMGYPPQTIVVEMARENQTTGKGKNNSKPRYKSLEKAIKDFGSQILKEHPTDNQELKNNRLYLYYLQNGKDIYTGQELDIHNLSNYDIDHIVPQSFITDNSIDNLVLTSSAGNREKGGDVPPLEIVRKRKVFWEKLYQGNLMSKRKFDYLTKAERGGLTEADKARFIHRQLVETRQITKNVANILHQRFNKETDNHGNTMEQVRIVTLKSALVSQFRKQFQLYKVREVNDYHHAHDAYLNGVVANTLLKVYPQLEPEFVYGEYHQFDWFKANKATAKKQFYTNIMLFFAQKERIIDENGEILWDKKYLETIKKVLDYRQINIVKKTEIQKGEFSKATIKPKGNSSKLIPRKENWDPVKYGGLDSPNMAYAVIIEHAKGKKKIVIEKKLIQINIMERKMFEKDEEAFLEEKGYHQPKVLTKLPKYTLYECEKGRRRMLSSANEAQKGNQLVLSNHLVSLLYHAKNCEASDGKSLKYIEAHRETFSELLAQVSEFATKYTLADANLSKINNLFEQNKEGDIKAIAQSFVDLMAFNAMGAPASFKFFEATIDRKRYTNLKELLSSTIIYQSITGLYESRKRLDD

SEQ ID NO: 305 - protein, 1334 aa, Listeria monocytogenes serotype 1/2a str. F6854
MKNPYTIGLDIGTNSVGWAVLTNQYDLVKRKMKVAGNSDKKQIKKNFWGVRLFDDGQTAVDRRMNRTARRRIERRRNRISYLQEIFAVEMANIDANFFCRLNDSFYVDSEKRNSRHPFFATIEEEVAYHDNYRTIYHLREKLVNSSEKADLRLVYLALAHIIKYRGNFLIEGALDTKNTSVDEVYKQFIETYNQVFMSNIEEGALAKVEENIEVANILAGKFTRREKFERILQLYPGEKSTGMFAQFISLIVGSKGNFQKVFDLIEKTDIECAKDSYEEDLETLLAIIGDEYAELFVAAKNTYNAVVLSSIITVTDTETNAKLSASMIERFDAHEKDLVELKAFIKLNLPKQYEEIFSNAAIDGYAGYIDGKTKQVDFYKYLKTILENIEGSDYFIAKIEEENFLRKQRTFDNGAIPHQLHLEELEAIIHQQAKYYPFLKEDYDKIKSLVTFRIPYFVGPLANGQSEFAWLTRKADGEIRPWNIEEKVDFGKSAVDFIEKMTNKDTYLPKENVLPKHSLCYQKYMVYNELTKIRYIDDQGKTNYFSGREKQQVFNDLFKQKRKVKKKDLELFLRNINHIESPTIEGLEDSFNASYATYHDLLKVGMKQEILDNPLNTEMLEDIVKILTVFEDKPMIKEQLQQFSDVLDGGVLKKLERRHYTGWGRLSAKLLVGIREKQSHLTILDYLMNDDGLNRNLMQLINDSNLSFKSIIEKEQVSTTDKDLQSIVAELAGSPAIKKGILQSLKIVDELVSIMGYPPQTIVVEMARENQTTGKGKNNSKPRYKSLEKAIKEFGSQILKEHPTDNQELKNNRLYLYYLQNGKDMYTGQELDIHNLSNYDIDHIVPQSFITDNSIDNLVLTSSAGNREKGGDVPPLEIVRKRKVFWEKLYQGNLMSKRKFDYLTKAERGGLTEADKARFIHRQLVETRQITKNVANILYQRFNKETDNHGNTMEQVRIVTLKSALVSQFRKQFQLYKVREVNGYHHAHDAYLNGVVANTLLKVYPQLEPEFVYGEYHQFDWFKANKATAKKQFYTNIMLFFAQKERIIDENGEILWDKKYLETIKKVLDYRQMNIVKKTEIQKGEFSKATIKPKGNSSKLIPRKENWDPMKYGGLDSPNMAYAVIIEHAKGKKKIVIEKKLIQINIMERKMFEKDEEAFLEEKGYRHPKVLTKLPKYTLYECEKGRRRMLASANEAQKGNQLVLSNHLVSLLYHAKNCEASDGKSLKYIEAHRETFSELLAQVSEFATRYTLADANLSKINNLFEQNKEGDIKAIAQSFVDLMAFNAMGAPASFKFFEATIDRKRYTNLKELLSSTIIYQSITGLYESRKRLDD

SEQ ID NO: 306 - protein, 1087 aa, Listeriaceae bacterium TTU M1-001
MKKLVLGLDIGVASVGWGIIDAENGDVVDTGVRLFSSRDASENESRRTSRQSRRLSRRKKHRRERIKQLLLAHDMDICDIVNENPYELRVKGLNEKLEVSEIYVALTHLAKRRGVSYLDDVVEEGGTIKSEHLNKNMEEIKSGKMPCEIQLERFEKYGQVRGMIEINQDTEESSFLVNIFRTSDYIKEAKTILATQQKFHKQITNEFIDEYIHIMASKRDYFIGPGNEKSRTDYGVYRTNGDTWDNLFEILIGKCSVFPEETRAARSSYVAQEFNLLNDLNNLKISNLESGKLSASQKHDIVEKVKNSKKFGTKDLLKYIASVCECKIEDIGGCRVDKNRKPIMHTFENYRKVHNALNEAGVDLRLSETDYDELMKIMTLNSETLEIKKQCKEKLPQLTEDYLNVCLVLNKKGAFSGWHALSLKAMKLMMPELYGTSKNQMQIIHTMQLGKAYLKPLNQQKYLNSEAILEEIYNPIAARSIRQTIKVTNAILKKYGHLDSVIIEMPRDYQTSEDERKMIEKMQKENEKEKKAALKRAREEYPFPDEAFRNHKELATKLRLWYQQDQFCVYSGRKISVVDLVRNPNQFEIDHIIPQSVSLDDSLNNKVLCFSEENQKKGQQTPFYYHKGKSGNWTYEQYKLFVEKLFDKKKISNKKRELLLFEEDINKWDVRRGFIARNLVDTRYASRVILNSYQQYFGNHEMGTKVKVVRGKFTSQLRKKWRIFKDRNESHSHHAIDALIVAATANLRLWKKNTLGVSDEGKVYDKETGEILPFEKLTESEYNEMMNKEPYLNFKTKLQNIETKVKYSYRVSKKVNRKISDATIYSTRERDGIDYIVGKIKNIYDVKTYKDQFLKRYKKNKEQFLMYQHDPQTFAILENIMATYQDAENPFLAYKKEYGVIRKYSKKGGGSPVTSLKFIDKVLGQKIDLTAKNQAALPKNKKVVLQSITPYRADVYYDEIDKRYHLIGVKYSLFSFSKQGYVINPIAYQKLLEKEQIHSEMKFCFSLYREDIIEFGEDPDSLTRYRFWSKNESGKNKIEVKPIEKPNFEKQTVLTITKKIKILNKYQTDVLGNSFKAQEEKDPRNIE

SEQ ID NO: 307 - protein, 1345 aa, Marinilabilia sp. AK2
MKKILGLDLGTTSIGWAFIKEPEKDVVGSEIVDMGVRIVALSSDEENDFAKGNTISINADRTLKRGARRNLQRFKLRRDALLEIFKEMKLIPSNFKYAEDGPSSTFSTLKLRDKAAKEKIELDDLVKVLLQINKKRGYRSSRKAKSEEDDGSAIDSMGIAKELYENDLTPGQWVFEALQKGRKNVPDFYRSDLQEEFKKIVNYQSEFYPDVLNSSFVEDWMGKASTPTKQYFNKKGVHLAENKGKREERRLQEYNWRAVAVNSKIDLSEIALILSQINSQISNSSGYLGAISDRSKELYFKNQTVGQYLYQQIKINPHTRLKGQVFYRQDYLDEFEKIWSVQSGFHPQLNDALKKEIRDITIFFQRRLKSQKHLISNCEFEDYHKVVPKSHPIFQEFRIWQNLNNLTLIKKDNLNEKSELALEDKIALANELAFKREQSVKDALNILGLKSSEWEFNFTKIEGNRTNHAFFEAFAKIIEIEDGEPLDLGNLKADDILDQFSEAFLRIGIDPGLLQVNNDIEGPNYEKQPYIQFWHLLYSSEDDQKLKQNLIKKFGFKPDHAKILASISLQDDHASLSSRAIKKILPHLQSGLIYDKACTYAGYNHSSSFTKEENEKRELSSELDLLKKNSLRNPVVEKILNQMINVVNAILKDPNLGKPDEIRVEMARELKANAEQRKNMTSNIASATRDHEKYREILKKEFGLKRVTKNDLLRYKLWLETDGISLYTGKPIEASKLFSKEYDIEHIIPKTRLFDDSFSNKTICERQLNIDKANVTAFSFLQNKLSGDEFEQYQSRVKSLFGKLSKAKIQKLLMANDKIPEDFIARQLQETRYISKKAKEILFEITRRVSVTTGTITDKLREDWGLVEIMKELNWEKYDKLGLTYTIEGKHGERLNKIKDWSKRNDHRHHAMDALTVALTKPAYIQYLNNLNAKELNGKKSTEIFAIEQKYLKRENGKLCFIPPVENIRTEAKKHLSKVLISYKAKNKVVTINKNRTNKKAGFNEQIALTPRGQLHKETVYGKAFHYSTKFEKIGASFDVQKINAVAKKEEREALLKRLAENGDDPKKAFTGKNSLSKMPIYLDLKRNIKLPEKVKTVVLEQNYTIRKNIDPDLKLDKVIDVGVKRILENRLKEFGGNAKLALSNLDENPIWLNKEKGITIKRVKISGVSNVESLHVKKDHFGEPILDQVGNEIPVDFVSTGNNHHVAIYEDEKGNLQEEVVSFFEAVVRQNQGLPIINKNHSLGWKFLFTLKQNEYFVFPSDDFDPTDVDLMDEENYHLISPNLFRVQKFTTKDYFFRHHLETTVEDKSELKGVSFKRLGLPGLNCIKKIRINHLGKIIQVGEY

SEQ ID NO: 308 - protein, 1352 aa, Megasphaera sp. UPII 135-E
MKKRNREEYYVGLDIGTSSVGWAVATPDYRIPKFRGHKMWGSRLFAEGKRAAERRQFRTNRRRLARRRDRLQILEELFAEEMAKVDNTFFMRLKESKFFLEDKTVKEKHILFSTDKFDADRFYKDNPTIYHVRKRLMEEEPQDIRELFLAVHHILKYRGHFLFAGSLEQNGASIEELVRTLLGKQGLAILDDTIDSNEMVNILKNTGETKSDRKKDVQELWNPLKDKVKKAQAAEMAGLVLGLKSDISKLFANSDYKDLDSSIKNINFSSGDYEEKRDDYANSIGDDIVLLDTMKALYDTLILSQILQGKRSISAAKVEDYNTHKEQLRALKAILKPHKRLYNEMFRENNKKDLSNYVAYISSYSEGKRVNREGFYKYVQAVLKQVDDSDSKQAILEAIRLETFLPLLRVKDNAVIPHQIHQAELEAILETARKKYNFLNDVSDGVSVKDKIIQLFTFRIPYYVGPLNPHSGETVADRKQGTGWVVRKQRGKVYPWNFADMVDVKASAEAFITNLTNKCTYLIGEDVLPKRSLLYSEFMLLNELNMIKYDGHELPVAIKQLYIEQVFKQEHKKQTKGRVLDFLKRNGLITGSATAVITGMDDAIKGDLQSYRDMVRIFGAGFDHSMAERIIRWVTLFGEAKDILENKIREVYGNSISDSQMRAIKKLKYADWGRLSQAFLIAVKGCDKSGVERNIITCLRASSQNLMEILSDQGTYIKQIKAWNHQHTTNMMDTLDYQLVDDLYVAPSVKRSIWQSLCIVEELVKIMGQAPKKIFVEVTRTKQAEKTKKDSRKKRLVELYTAIGKEGAAWKKEIEAHQAGDFRRKKLYLYYTQMGRCMYSNEPIAMDALFTSAYDIDHIYPQSLTKDGSWDNLVLVKSQLNKEKSDQYPLRPAIREKNKAHWQYLCRAGFISEKKYERLMRTTELTAEELSGFIARQLVETSQATKAVTGLLERIYTNTEICFVKAETVSQFRHQHNFIKIRELNNYHHAKDAYLNIVVGNVYHEKFTKNPWEFIARSTERRPYNLNRMYDFDLLKQGRVIWQVPKSLETVQAMMKSNDVRITKKLLVQKGELYDATITKAHKAKEGTYFPLKGADARLRDVHRYGGYEKIKIAYYSVFSCREKASNTIHTLIIPIPVYKAGLLQTEADLTAYAWQTKQKTKPIKDIYSAITPIYKKLCINTVVKIDGFKYFLGGKTGDYMWLDPAIPVVLDEQAAAYLKAISKVGRADDVENTAQAIDLITAEANEAFYDVLLKKMEAKIFAKAYQTIVEKLASETARERFRELSIGAQCSCLLEILNLLANNKTTFTFFKDKMGVTMSRRKQPMDLTKLEECIVYETSITGLYEKAVSLL

SEQ ID NO: 309 - protein, 1080 aa, Methylocystis sp. ATCC 49242
MRVLGLDGGIASIGWALIEIFEDHEPSDGRIIDTGAWMFDAPEEKSQTGTKLKSELRRIFRGQRRVIRRRRQRMNEVRRILHRHGLLSSDNRDALKQPGLDPWKIRAEGIDRLLSPIEFAVALGHIARHRGFKSNSKGAKTSDLDAESSRMKKAVGETREKLARFGSPAKLLVEDEGFVLRQTKLKSGALETVRRFRNRDGDYSRSLLRDDLAAEVRALFRAQARLQSTFAKVELEAEFTQAAFFQRPLQDSERLVGPCPFEPAEKRSPKRGYSFELFRFLSRLNHLTLREGSEERTLTVEELRTAAADFGGVAKFTFSTLRKRLALPDIAIFVGIKADDEKKLDVVARSGEAATGTARLRRVVIDALGELAWGALISAPERLDKITEIITFRSDLDRIRAGLIEAGFDTPLIEAIVRAAADGKLDAFTGVGHISAKAARNIIPGLMRGMTYDKACAAAGYDHTASRERDAFDVGMHGKEALKKILQEERISRELVGSPSARKALIEAVKQVKAIIEKYGVPDRIHVELARDVGKSIEERRDIHFGIEKRSRQKDKLRELFGKEVGHLPQDGERGKEELLRFELWNEQMGRCLYTDEYINPKQLVASDNSVQVDHILPWSRFGDDSYLNKTLCTAKANQDKKGRTPYEWFRADKPEAEWDAFVARVESIQFMKGLKKRNYKLKNAEEAAEKFRSRNLNDTRWTCRLLAEALKQLYPKGEKDKDGKERRRVFTRPGALTNRLRRAWSLQRRKKSEKGERIADDRHHALDAIIVAATTESLLIRATREVQDIERKGLHYDLTKNITQPWPGFADEALDAVEKVFVARAERRRARGKAHDATIRHIAVRDDEAKVYERKKVGDIKLGDLIRVKDAERNAPLIENLRKWIEAGSPRDNPPLSPKGDPVSKVRLVTKNKVNITLDTGNPERLATVDRGEMARVDVFRKANRKGKYEYYLVPIYPHEIATMETPPMRAVQGGGDDDKWPEIDSTFEFLWSINQLSLLELTKPDGEVIRSYFRSLDRNTGALTVSGIANSTATRKGIGTRTLIDFKKLHVDRLGQIFEVERELRTWRGETWRGKDCI

SEQ ID NO: 310 - protein, 1082 aa, Methylosinus trichosporium OB3b
MRVLGLDAGIASLGWALIEIEESNRGELSQGTIIGAGTWMFDAPEEKTQAGAKLKSEQRRTFRGQRRVVRRRRQRMNEVRRILHSHGLLPSSDRDALKQPGLDPWRIRAEALDRLLGPVELAVALGHIARHRGFKSNSKGAKTNDPADDTSKMKRAVNETREKLARFGSAAKMLVEDESFVLRQTPTKNGASEIVRRFRNREGDYSRSLLRDDLAAEMRALFTAQARFQSAIATADLQTAFTKAAFFQRPLQDSEKLVGPCPFEVDEKRAPKRGYSFELFRFLSRLNHVTLRDGKQERTLTRDELALAAADFGAAAKVSFTALRKKLKLPETTVFVGVKADEESKLDVVARSGKAAEGTARLRSVIVDALGELAWGALLCSPEKLDKIAEVISFRSDIGRISEGLAQAGCNAPLVDALTAAASDGRFDPFTGAGHISSKAARNILSGLRQGMTYDKACCAADYDHTASRERGAFDVGGHGREALKRILQEERISRELVGSPTARKALIESIKQVKAIVERYGVPDRIHVELARDVGKSIEEREEITRGIEKRNRQKDKLRGLFEKEVGRPPQDGARGKEELLRFELWSEQMGRCLYTDDYISPSQLVATDDAVQVDHILPWSRFADDSYANKTLCMAKANQDKKGRTPYEWFKAEKTDTEWDAFIVRVEALADMKGFKKRNYKLRNAEEAAAKFRNRNLNDTRWACRLLAEALKQLYPKGEKDKDGKERRRVFSRPGALTDRLRRAWGLQWMKKSTKGDRIPDDRHHALDAIVIAATTESLLQRATREVQEIEDKGLHYDLVKNVTPPWPGFREQAVEAVEKVFVARAERRRARGKAHDATIRHIAVREGEQRVYERRKVAELKLADLDRVKDAERNARLIEKLRNWIEAGSPKDDPPLSPKGDPIFKVRLVTKSKVNIALDTGNPKRPGTVDRGEMARVDVFRKASKKGKYEYYLVPIYPHDIATMKTPPIRAVQAYKPEDEWPEMDSSYEFCWSLVPMTYLQVISSKGEIFEGYYRGMNRSVGAIQLSAHSNSSDVVQGIGARTLTEFKKFNVDRFGRKHEVERELRTWRGETWRGKAYI

SEQ ID NO: 311 - protein, 1123 aa, Mobiluncus curtisii subsp. holmesii ATCC 35242
MFVYLNSPRGFGPATFLTDLPHFCIIFGNNDFMDNRKYHVGIDVGTNSVGFAAVEVGDSGSPIRFLNTMVVIHDSGVDPEQKKYAITRLASAGTARRTRRLYRTRRQRLRELDDFISNELGYPLVNLENFADPYEPWKVRADLATIKLPADELPEAMSIALRHMARHRGWRSPYQRVEALHLHAEISEEFSALKKRVMEKTGDVFSDDATPAEVLVDLMGRQKIRGADGMLSGKLRQSDNANELRKIASVQGIDDETLNRIIDRVFFSRSPKGKASERVGMDALPGQGSKPRALKAMPSFQKFRIVSVICNLRIKDSGDDNRPLSMEEKEQLIGYLMSSTTDDHVTWTDVAELLHVKRSNLQGTAKEGPDGERPYTRPPVNSAWSKIKDSKIKSLVALWKTGDVDVQSAIVEALSNASVLEDARPGADIVVAYLESLDDKELESLDKVGLPAGRASYSEDSLERLTERMLQDDCDLFEARKREFGVSDDWKPPADPIYAPVGNPGVDRVLKIVNRLLMAAEREWGAPTQINIEHVRSGFSSELMQREFERENERRRAQNEEAVKAILTEKGGNSHVSKYDIIRYYAVKRQNCQCLYCGTPITFSDCELDHIVPRKGVGSTNSRVNLAAACRSCNRDKSNLPFAVWAGKTSNFDVSIDGAVSRVKQWQRSQNEGAREFRAFQNEVISRLLKTTEDPEIDSRSLESVAWMARELHHRVEYYFQSKGAQTQVSVYRGAVTAQARKSSGLEDKVKMIGGGGKTRLDRRHHAMDAATIALMTPGISTTLSEKNNLRDAQKFTGQSETWKDYCGRTETAREHFAVWKSNMERLTDLFNDKLENDAIPVVQPLRLRLSDSKAHDDGIGKLDSKKLGSVWSLADIDRAATPQIWTALTRCDDFDPTKGLPENANRVIRAQGVKYESEDNIPVFPSNVAAIAVRDGYAEIGSTIHHARIYRIDDGKKIFYSMIRVFAVDLLKHQAEDLFTVKLPPSAISIRTCEDSLRRALSNGTAEYLGWLVPGDEIIVDTSDKAFHTGQIGDLLRNFPVNSFRLTGFPSNSRLRLKPVLLAGEGLRDDAEDSIKKILSGQGWRPAINVLFSKGKPRIVRRNSLGIERPSSNNGLPFSWEA

SEQ ID NO: 312 - protein, 1091 aa, Mobiluncus mulieris 28-1
MDSRKYRVGIDVGTNSVGFAAVEEDDSGSPTRFLNTMVVIHDSGVDPEQKKYAITRLASAGTARRTRRLYRTRRQRLRELDDFISNELGYPLVNLENFADPYEPWKVRADLATTKLPNDELPEAMSIALRHMARHRGWRSPYQRVEALHLHAEISKEFAALKERVVEKTGDVFSDDATPAEVLVDLMGRQKVRGADGVLSGKLRQSDNANELRKIASVQGIDDETLNRIIDRVFSSKSPKGKASERVGMDALPGQGSKPRALKAMPSFQKFRVVSVICNLRIKDSGGDARPLSMEEKEKLIDYLMSSTTDDHVTWTDVADLLHVKRSQLQGTAKEGFDGERPYTRPPVNSTWSKIKDSKIKSLVALWKTGDVDVQSAIVEALSNASVLEDSRPGADIVVAYLESLDDKELESLDKVGLPAGRASYSEDSLERLTERMLRDDCDLFEARKREFNVADDWKPPADPIYAPVGNPGVDRVLKIVNRLLMAAEREWGAPTQINIEHVRSGFSSELMQREFERENERRRAQNEEAVKAILTEKGGNSRVSKYDITRYYAVKRQHCQCLYCGTPITFSDCELDHIVPRKGVGSTNTRVNLAAACRSCNRDKSNLPFAVWAGKASNFDVSIDDAVSRVKQWQRSQNEGVREFRAFQNEVISRLLKTTEDPEIDSRSLESVAWMARELHHRVEYYFQSKGAQTQVSVYRGAVTAQARKSSGLEDKVKMIGGGGKTRLDRRHHAMDAATIALMTPGISTTLSEKNNLRDAQKFTGQSETWKDYCGRTETARKHFAVWKSNMERLTDLFNDKLENDAIPVVQPLRLRLSNSKAHDDGIGKLDSKKLGSVWSLADIDRAATPQIWTALTRCDDFDPTKGLPENANRVIRAQGVKYESEDNIPVFPSNVAAIAVRDGYAEIGSTIHHARIYRIDDGKKTFYSMIRVFAVDLLKHQAEDLFTVKLPPSAISIRTCEDSLRRALSNGTAEYLGWLVPGDEIIVDTSDKAFHTGQIGDLLRNFPVNSFRLTGFPSNSRLRLKPVLLAGEGLRDDAEDSIKKILLGQGWRPAINVLFSKGKPRIVRRNSLGIERPSSNNGLPFSWEA

SEQ ID NO: 313 - protein, 1091 aa, Mobiluncus mulieris FB024-16
MDSRKYRVGIDVGTNSVGFAAVEEDDSGSPTRFLNTMVVIHDSGVDSEQKKYAITRLASAGTARRTRRLYRTRRQRLRELDDFISNELGYPLVNLENFADPYEPWKVRADLATTKLPNDELPEAMSIALRHMARHRGWRSPYQRVEALHLHAEISKEFAALKERVVEKTGDVFSDDATPAEVLVDLMGRQKVRGADGVLSGKLRQSDNANELRKIASVQGIDDETLNRIIDRVFSSKSPKGKASERVGMDALPGQGSKPRALKAMPSFQKFRVVSVICNLRIKDSGGDARPLSMEEKEKLIDYLMSSTTDDHVTWTDVADLLHVKRSQLQGTAKEGFDGERPYTRPPVNSTWSKIKDSKIKSLVALWKTGDVDVQSAIVEALSNASVLEDSRPGADIVVAYLESLDDKELESLDKVGLPAGRASYSEDSLERLTERMLRDDCDLFEARKREFNVADDWKPPADPIYAPVGNPGVDRVLKIVNRLLMAAEREWGAPTQINIEHVRSGFSSELMQREFERENERRRAQNEEAVKAILTEKGGNSRVSKYDITRYYAVKRQHCQCLYCGTPITFSDCELDHIVPRKGVGSTNTRVNLAAACRSCNRDKSNLPFAVWAGKASNFDVSIDDAVSRVKQWQRSQNEGVREFRAFQNEVISRLLKTTEDPEIDSRSLESVAWMARELHHRVEYYFQSKGAQTQVSVYRGAVTAQARKSSGLEDKVKMIGGGGKTRLDRRHHAMDAATIALMTPGISTTLSEKNNLRDAQKFTGQSETWKDYCGRTETARKHFAVWKSNMERLTDLFNDKLENDAIPVVQPLRLRLSNSKAHDDGIGKLDSKKLGSVWSLADIDRAATPQIWTALTRCDDFDPTKGLPENANRVIRAQGVKYESEDNIPVFPSNVAAIAVRDGYAEIGSTIHHARIYRIDDGKKTFYSMIRVFAVDLLKHQAEDLFTVKLPPSAISIRTCEDSLRRALSNGTAEYLGWLVPGDEIIVDTSDKAFHTGQIGDLLRNFPVNSFRLTGFPSNSRLRLKPVLLAGEGLRDDAEDSIKKILLGQGWRPAINVLFSKGKPRIVRRNSLGIERPSSNNGLPFSWEA

SEQ ID NO: 314 - protein, 1473 aa, Mucilaginibacter paludis DSM 18603
MKNILGLDLGTNSIGWALIEKDTDQKNGNILGTGSRIIPMSQDIKDEFGKGNSISQTADRTKFRSVRRLRERHLLRRERLHRVLNVLGFLPKHYADQIDFKKRLGKLVNETEPKLVYDNKNFIFKKSFEAMLSDFNQHQPLLLADGKKVPFDWTIYYLRKKALTEKIEKEELAWLILNFNQKRGYYQLRGEEEEENPNKMVAFHSLKIVEVIADESQKGKAETWYSLILENGWIYRRSSKTPLYDWKGKQRDFIVTTDLNDDGSIKTDKEGLEKRSFRAPVEDDWTLVKKKTEQEINRSHKTVGTYIYENLLQDPKQKIKGKLVRTIEREFYKDELKMILKNQQKFHPELNDEHLYINCVRELYRNNQAHQTILSKKDFVHLFIDDIIFYQRPLRSQKSSISNCTLEFRKYKNENGTDQTDYLKAIPKSHPLFQEFRLWQWIYNLGIYQKEDDTNVTDELIKNIDGYQDLFDFLNNKKEIRQDILIKFLVEQTGLKGKPLSSVVAKYRWNFVEDKIYPCNETGTQIRTRLAKVENTPEDFLTAETEIKLWHIIYSVNDKADYEKALKTFAEKHNLDTHSFVENFKKFPPFKSEYGSFSEKAIKKLLPLIRLGKYWSWENIDKKTQERIEKILTGEFDEAIKSRVRDKAIHLTEEDHFQGLQLWLASYVVYGRHSEADNLDKWHTVADLEDYLAEFRQHSLRNPIVEQVITETLRVVKDIWLQYGQGAKDFFSEIHIELAREMKNTGDERKRLTSLVTDNENTNLRIKVLLSELLNDGNVENVRPYSPMQQEALKIFEDGVLNSDIEIEDDILKISKMAQPTNTELKRYKLWLEQKYRSPYTGQIIPLNRLFTADYEIEHIIPQSRFFDDSFSNKIICESAVNQLKDKQLGLEFIKNHSGTIVKLGMGKTAKILDVESYNEFVKGNYTKNISKRNKLMLEEIPDKMIERQLNDTRYISKFIISALSNIVRSESNDDGFNSKNVLPGNGKITSRLKQDWGMNDIWNELILPRFERMNKITDSAVFTAWNENNQKFLPIVPLEFSKGFQKKRIDHRHHALDALVIAASTREHINLLNNEHAKSDKRFDLNRKLRKFEKVAYNDPKTGKRIEKEVPTIFLKPWETFTVDAKNSLESIIVSFKQNLRVINRATNYSESYNDENGALRLGKDGNPLKEKIKQSKGDSWAIRKPMHKDFVYGKVHLQNVKLPKDKFITAIRKSLDVTFDLKRIETITDTGIQKILKNYLHSKENKVELAFSPEGIEDMNQHIERYNDGKKHQPIHKVRVFEIGSRFSLGESGNKKTKFVEAAKGTNLFFAVYQDDNKGKRNYETIPLNIVIERQKLGLHSVPTEDAKGGKLLFHLSPNDMVYVPTSEELEDNLASVNIKRLNTAQRKRIYKVEKASGVECYFIRQDIAYLIKNYDAKTKIGELESQNKLQTTMTDDRLKITDVCVKLNIDRLGSIAETFLGNQYGASKKT

SEQ ID NO: 315 - protein, 1233 aa, Mycoplasma canis PG 14
MEKKRKVTLGFDLGIASVGWAIVDSETNQVYKLGSRLFDAPDTNLERRTQRGTRRLLRRRKYRNQKFYNLVKRTEVFGLSSREAIENRFRELSIKYPNIIELKTKALSQEVCPDEIAWILHDYLKNRGYFYDEKETKEDFDQQTVESMPSYKLNEFYKKYGYFKGALSQPTESEMKDNKDLKEAFFFDFSNKEWLKEINYFFNVQKNILSETFIEEFKKIFSFTRDISKGPGSDNMPSPYGIFGEFGDNGQGGRYEHIWDKNIGKCSIFTNEQRAPKYLPSALIFNFLNELANIRLYSTDKKNIQPLWKLSSVDKLNILLNLFNLPISEKKKKLTSTNINDIVKKESIKSIMISVEDIDMIKDEWAGKEPNVYGVGLSGLNIEESAKENKFKFQDLKILNVLINLLDNVGIKFEFKDRNDIIKNLELLDNLYLFLIYQKESNNKDSSIDLFIAKNESLNIENLKLKLKEFLLGAGNEFENHNSKTHSLSKKAIDEILPKLLDNNEGWNLEAIKNYDEEIKSQIEDNSSLMAKQDKKYLNDNFLKDAILPPNVKVTFQQAILIFNKIIQKFSKDFEIDKVVIELAREMTQDQENDALKGIAKAQKSKKSLVEERLEANNIDKSVFNDKYEKLIYKIFLWISQDFKDPYTGAQISVNEIVNNKVEIDHIIPYSLCFDDSSANKVLVHKQSNQEKSNSLPYEYIKQGHSGWNWDEFTKYVKRVFVNNVDSILSKKERLKKSENLLTASYDGYDKLGFLARNLNDTRYATILFRDQLNNYAEHHLIDNKKMFKVIAMNGAVTSFIRKNMSYDNKLRLKDRSDFSHHAYDAAIIALFSNKTKTLYNLIDPSLNGIISKRSEGYWVIEDRYTGEIKELKKEDWTSIKNNVQARKIAKEIEEYLIDLDDEVFFSRKTKRKTNRQLYNETIYGIATKTDEDGITNYYKKEKFSILDDKDIYLRLLREREKFVINQSNPEVIDQIIEIIESYGKENNIPSRDEAINIKYTKNKINYNLYLKQYMRSLTKSLDQFSEEFINQMIANKTFVLYNPTKNTTRKIKFLRLVNDVKINDIRKNQVINKFNGKNNEPKAFYENINSLGAIVFKNSANNFKTLSINTQIAIFGDKNWDIEDFKTYNMEKIEKYKEIYGIDKTYNFHSFIFPGTILLDKQNKEFYYISSIQTVRDIIEIKFLNKIEFKDENKNQDTSKTPKRLMFGIKSIMNNYEQVDISPFGINKKIFE

SEQ ID NO: 316 - protein, 1233 aa, Mycoplasma canis PG 14; identical to SEQ ID NO: 315

SEQ ID NO: 317 - protein, 1233 aa, Mycoplasma canis UF31
MEKKRKVTLGFDLGIASIGWAIVDSETNQVYKLGSRLFDAPDTNLERRTQRGTRRLLRRRKYRNQKFYNLVKRTEVFGLSSREAIENRFRELSIKYPNIIELKTKALSQEVCPDEIAWILHDYLKNRGYFYDEKETKEDFDQQTVESMPSYKLNEFYKKYGYFKGALSQPTESEMKDNKDLKEAFFFDFSNKEWLKEINYFFNVQKNILSETFIEEFKKIFSFTRDISKGPGSDNMPSPYGIFGEFGDNGQGGRYEHIWDKNIGKCSIFTNEQRAPKYLPSALIFNFLNELANIRLYSTDKKNIQPLWKLSSIDKLNILLNLFNLPISEKKKKLTNANINDIVKKESTKSIMLSVEDIDMIKDEWAGKEPNVYGVGLSGLNIEESAKENKFKFQDLKILNVLINLLDNVGIKFEFKDRNDIIKNLELLDNLYLFLIYQKESNNKDSSIDLFIAKNELLNIENLKLKLKEFLLGAGNEFENHNSKTHSLSKKAIDAILPKLLDNNEGWNLEAIKNYDEEIKSQIEDNSSLMAKQDKKYLNDNFLKDAILPPNVKVTFQQAILIFNKIIQKFSKDFEIDKVVIELAREMTQDQENDALKGIAKAQKSKKSLVEERLEANNIDKSVFNDKYEKLIYKIFLWISQDFKDPYTGAQISTNEIVNNKVEIDHIIPYSLCFDDSSANKVLVHKQSNQEKSNSLPYEYIKQGHSGWNWDEFTKYVKRVFVNNVDSILSKKERLKKSENLLTTSYDGYDKLGFLARNLNDTRYATILFRDQLNNYAEHHLIDNKKMFKVIAMNGAVTSFIRKNMSYDNKLRLKDRSDFSHHAYDAAIIALFSNKTKTLYNLIDPSLNGIISKRSEGYWVIEDRYTGEIKELKKEDWTSIKNNVQARKIAKEIEEYLIDLDDEVFFSRKTKRKTNRQLYNETIYGIAAKTDEDGITNYYKKEKFSILDDKDIYLRLLREREKFVINQSNPEVIDQIIEIIESYGKENNIPSRDEAINIKYTKNKINYNLYLKQYMRSLTKSLDQFSEEFINQMIANKTFVLYNPTKNTTRKIKFLRLVNDVKINDIRKNQVINKFNGKNNEPKAFYENINSLGAIVFKNSANNFKTLSINTQIAIFGDKNWDIEDFKTYNMEKIEKYKEIYGIDKTYNFHSFIFPGTILLDKQNKEFYYISSIQTVRDIIEIKFLNKIEFKDENKNPDTSKTPKRLMFGIKSIMNNYEQVDISPFGINKKIFE

SEQ ID NO: 318 - protein, 1233 aa, Mycoplasma canis UF33
MEKKRKVTLGFDLGIASVGWAIVDSETNQVYKLGSRLFDAPDTNLERRTQRGTRRLLRRRKYRNQKFYNLVKRTEVFGLSSREAIENRFRELSIKYPNIIELKTKALSQEVCPDEIAWILHDYLKNRGYFYDEKETKEDFDQQTVESMPSYKLNEFYKKYGYFKGALSQPTESEMKDNKDLKEAFFFDFSNKEWLKEINYFFNVQKNILSETFIEEFKKIFSFTRDISKGPGSDNMPSPYGIFGEFGDNGQGGRYEHIWDKNIGKCSIFTNEQRAPKYLPSALIFNFLNELANIRLYSTDKKNIQPLWKLSSVDKLNILLNLFNLPISEKKKKLTSTNINDIVKKESIKSIMISVEDIDMIKDEWAGKEPNVYGVGLSGLNIEENAKENKFKFQDLKILNVLINLLDNVGIKFEFKDRNDIIKNLELLDNLYLFLIYQKESNNKDSSIDLFIAKNKSLNIENLKLKLKEFLLGAGNEFENHNSKSHSLSKKAIDAILPKLLDNNEGWNLEAIKNYDEEIKSQIEDNSSLMAKQDKKYLNDNFLKDAILPPNVKVTFQQAILIFNKIIQKFSKDFEIDKVVIELAREMTQDQENDALKGMAKAQKSKKSLVEERLEANNIDKSVFNDKYEKLIYKIFLWISQDFKDPYTGAQISVNEIVNNKVEIDHIIPYSLCFDDSSANKVLVHKQSNQEKSNSLPYEYIKQGHSGWNWDEFTKYVKRVFVNNVDSILSKKERLKKSENLLTTSYDGYDKLGFLARNLNDTRYATILFRDQLNNYAEHHLIDNKKMFKVIAMNGAVTSFIRKNMSYDNKLRLKDRSDFSHHAYDAAIIALFSNKTKTLYNLIDPSLNGIISKRSEGYWVIEDRYTGEIKELKKEDWTSIKNNVQARKIAKEIEEYLIDLDDEVFFSRKTKRKTNRQLYNETIYGIAAKTDEDGITNYYKKEKFSILDDKDIYLRLLREREKFVINQSNPEVIDQIIEIIESYGKENNIPSRDEAINIKYTKNKINYNLYLKQYMRSLTKSLDKFSEEFINQMIANKTFVLYNPTKNTTRKIKFLRLVNDVKINDIRKNQVINKFNGKNNEPKAFYENINSLGAIVFKNSANNFKTLSINTQIAIFGDKNWDIEDFKTYNMEKIEKYKEIYGIDKTYNFHSFIFPGTILLDKQNKEFYYISSIQTVRDIIEIKFLNKIEFKDENKNQDTSKTPKRLMFGIKSIMNNYEQVDISPFGINKKIFE

SEQ ID NO: 319 - protein, 1233 aa, Mycoplasma canis UFG1
MEKKRKVTLGFDLGIASVGWAIVDSETNQVYKLGSRLFDAPDTNLERRTQRGTRRLLRRRKYRNQKFYNLVKRTEVFGLSSREAIENRFRELSIKYPNIIELKTKALSQEVCPDEIAWILHDYLKNRGYFYDEKETKEDFDQQTVESMPSYKLNEFYKKYGYFKGALSQPTESEMKDNKDLKEAFFFDFSNKEWLKEINYFFNVQKNILSETFIEEFKKIFSFTRDISKGPGSDNMPSPYGIFGEFGDNGQGGRYEHIWDKNIGKCSIFTNEQRAPKYLPSALIFNFLNELANIRLYSTDKKNIQPLWKLSSVDKLNILLNLFNLPISEKKKKLTSTNINDIVKKESIKSIMLSVEDIDMIKYEWAGKEPNVYGVGLSGLNIEESAKENKFKFQDLKILNVLINLLDNVGIKFEFKDRNDIIKNLELLDNLYLFLIYQKESNNKDSSIDLFIAKNKSLNIENLKLKLKEFLLGAGNEFENHNSKTHSLSKKAIDAILPKLLDNNEGWNLEAIKNYDEEIKSQIEDNSSLMAKQDKKYLNDNFLKDAILPPNVKVTFQQAILIFNKIIQKFSKDFEIDKVVIELAREMTQDQENDALKGIAKAQKSKKSLVEERLEANNIDKSVFDDKYEKLIYKIFLWISQDFKDPYTGAKISANEIVNNKVEIDHIIPYSLCFDDSSANKVLVHKQSNQEKSNSLPYEYIKQGHSGWNWDEFTKYVKRVFVNNVDSILSKKERLKKSENLLTTSYDGYDKLGFLARNLNDTRYATILFRDQLNNYAEHHLIDNKKMFKVIAMNGAVTSFIRKNMSYDNKLRLKDRSDFSHHAYDAAIIALFSNKTKTLYNLIDPSLNGIISKRSEGYWVIEDRYTGEIKELKKEDWTSIKNNVQARKIAKEIEEYLIDLDDEVFFSRKTKRKTNRQLYNETIYGIAAKTDEDGITNYYKKEKFSILDDKDIYLRLLREREKFVINQSNPEVIDQIIEIIESYGKENNIPSRDEAINIKYTKNKINYNLYLKQYMRSLTKSLDQFSEEFINQMIANKTFVLYNPTKNTTRKIKFLRLVNDVKINDIRKNQVINKFNGKNNEPKAFYENINSLGAIVFKNSANNFKTLSINTQIAIFGDKNWDIEDFKTYNMEKIEKYKEIYGIDKTYNFHSFIFPGTILLDKQNKEFYYISSIQTVRDIIEIKFLNKIEFKDENKNQDTSKTPKRLMFGIKSIMNNYEQVDISPFGINKKIFE

SEQ ID NO: 320 - protein, 1233 aa, Mycoplasma canis UFG4
MEKKRKVTLGFDLGIASVGWAIVDSETNQVYKLGSRLFDAPDTNLERRTQRGTRRLLRRRKYRNQKFYNLVKRTEVFGLSSREAIENRFRELSIKYPNIIELKTKALSQEVCPDEIAWILHDYLKNRGYFYDEKETKEDFDQQTIESMPSYKLNEFYKKYGYFKGALSQPTESEMKDNKDLKEAFFFDFSNKEWLKEINYFFNVQKNILSETFIEEFKKIFSFTRDISKGPGSDNMPSPYGIFGEFGDNGQGGRYEHIWDKNIGKCSIFTNEQRAPKYLPSALIFNFLNELANIRLYSTDKKNIQPLWKLSSIDKLNILLNLFNLPISEKKKKLTSANINDIVKKESTKSIMLSVEDIDMIKDEWAGKEPNVYGVGLSGLNIEESAKENKFKFQDLKILNVLINLLDNVGIKFEFKDRNDIIKNLELLDNLYLFLIYQKESNNKDSSIDLFIAKNESLNIENLKLKLKEFLLGAGNEFENHNSKTHSLSKKAIDAILPKLLDNNEGWNLEAIKNYDEEIKSQIEDNSFLMAKQDKKYLNDNFLKDAILPPNVKVTFQQAILIFNKIIQKFSKDFEIDKVVIELAREMTQDQENDALKGIAKAQKSKKSLVEERLEANNIDKSVFNEKYEKLIYKIFLWISQDFKDPYTGAKISANEIVDNKVEIDHIIPYSLCFDDSSANKVLVHKQSNQEKSNSLPYEYIKQGHSGWNWDEFTKYVKRVFVNNVDSILSKKERLKKSENLLTTSYDGYDKLGFLARNLNDTRYATILFRDQLNNYAEHHLIDDKKMFKVIAMNGAVTSFIRKNMSYDNKLRLKNRNDFSHHAYDAAIIALFSNKTKTLYNLIDPSLNGIISKRSEGYWVIEDRYTGEIKELKKEDWTSIKNNVQARKIAKEIEEYLIDLDDEVFFSRKTKRKTNRQLYNETIYGIAAKTDEDGITNYYKKEKLSILDDKDIYLRLLREREKFVINQSNPEVIDQIIEIIESYGKENNIPSRDEAINIKYTKNKINYNLYLKQYMRSLTKSLDQFSEEFINQMIANKTFVLYNPTKNTTRKIKFLRLVNDVKINDIRKNQVINKFNGKNNEPKAFYENINSLGAIVFKNSANNFKTLSINTQIAIFGDKNWDIEDFKTYNMEKIEKYKEIYGIDKTYNFHSFIFPGTILLDKQNKEFYYISSIQTVRDIIEIKFLNKIEFKDENKNQDTSKTPKRLMFGIKSIMNNYEQVDISPFGINKKIFE

SEQ ID NO: 321 - protein, 1239 aa, Mycoplasma cynos
MEEKRKVTLGFDLGVASVGWAIVDSETNEVYKLGSRLFDIPDTNIDRRAKRGSRRLVRRRSYRNQKFYNLIKRTKTFGFLDKEAIEKEFVLLSIKYPNIIELKVKGLQEEVSKSEAVWILHDYLKNRGYFYDDKEEKDDLENPSIESMPSYKLYEFYKEYGYFKGALSSPTESEKNKDSDLEKAIFFNFSNKEWTKEINHFFKIQKNIFSEDFKAKFMEFFSFIRDISKGPGSENMPSQYSIFGKYGDDGMGGKYQHIWDKNIGKCSIFKDKVRAPKYLPSALFFNLLNELSNIRLYSVDKREKSVLWRLSSKDKINIILNILQIILFKNDGKISNLDINKIVKNESIKSIILNEIDLDLIKDMWFEKEPNVYGIGLSGLNIEENKKENRFKFQDLKIFSVFIDLLKKSNINIEFNNEKDIIHNLKLLDELYFFLITQKYSRDKYGSIKKFILNNKSFNIDNLDEKLNIFLSISDDEFDNHNSKTHSLSKEAIYFIFPKLLHNNEGWNLEAIKNYDIDVREEISKHSFGIKKQDKKYLDDAFLDDAILPPSVKVTIKQSILIFNKIIKKFSNKFQIDNVVIELAREMTQEKEMDAQKSLNRLKKSRKKIIEERLNANNIDSKMFRDKTGEISPNYIYKIYLWISQNFKDPYTGENISANDILKNNVEIDHIIPYSLCFDDSSSNKVLVFKHSNQSKGNFLPFDMISTFSENSVWNWKEYTQYVEKTFKTNLESILDKKERVKKADNLLTSSYDGYDKLGFLARNLNDTRYATILFRDQLINYSENHLIDSKKMFKVIAMNGGVTSFIRKNMSFDSGLKVKDRSIFSHHAYDAAIIALFSNKTKILYNLINPSLDGIISKRSEGYWVLEDRLTGEIRKLNYNDWQSIKNNVEVKKIAREIESHLSNLDNVVMFSRKSKRKTNKELYNETLYGIATRIDENGIKNYYKKEKFNILEDENIYLRLLNERENFIINRSNPEVIDAIIEIFETIDKNKIPARDVAKNIKYTDNKIKYNLYLKDYMRKLVDEFPDKFRKDFIEQMIAKKIFILFNPIKNTTRKIKSLRSINNNKIEDIRKKQVLEKFNTAKNEPRSFYESLNSLGAIIFKNNLNIYKKMSISSQIATFGDKNWKIDDINTYNKEKLNKYKEIYGIDETYDFYSFIFPGTILLDEKNKEFLYISSIQTLKDKIELKFLDRIEFEKKNVNSNLKPKIKREIISTKKLMSDYKIIKISPLGINKKIFE

SEQ ID NO: 322 - protein, 1269 aa, Mycoplasma gallisepticum
MNNSIKSKPEVTIGLDLGVGSVGWAIVDNETNIIHHLGSRLFSQAKTAEDRRSFRGARRLIRRRKYKLKRFINLIWKYNSYFGFKNKEDILNNYQEQQKLHNTVLNLKLEALNAKIDPKALSWILHDYLKNRGHFYEDNRDFNVYPTEELANYFGEYGYYKGIIDSKEDNDDKLEEGLTKYKFSNQHWLEEIKKVLSNQTGLPEKFKEEYESLFSYVRNYSEGPGSINSVSPYGIYHLDEKEGKVVQKYNNIWDKTIGKCSIFPDEYRAPKNSPIAMIFNEINELSTIRSYSIYLTGWFINQEFKKAYLNKLLDLLIKTNSEKPIDARQFKKLREETIAESIGKETLKDVEREEKLEKEDHKWKLKGLKLNTNGKIQYNDLSSLAKFVHKLKQHLKLDFLLEDQYTTLDKINFLQSLFVYLGKHLRYSNRVDSANLKEFSDSNKLFERVLQEQKDDLFKLFEQTDKDDEKILAQTHSLSTKAMLLAITRMTNLDNDEDNQKNNDKGWNFEAIKNFDQKFIDITKKNNNLSLKQDKRYLDDRFINDAILSPGVKRILREATKVFNAILKQFSEEYDVTKVVIELARELSEEKELENTKNYEKLIKKNSDKISERLEALDIAEDKIEDILKSPTKSYKVLLWLQQDHIDPYSQKEIAFEDILTKTEKTEIDHIIPYSISFDDSSSNKLLVLAESNQAKSNQTPYEFITSGNAGIKWEDYEAYCRKFKDGDTSLLDSTQRSKKFAKMMKTDTSSKYDIGFLARNLNDTRYATIVFRDALKDYANNHLVEDKPMFKVVCINGGVTSFLRKNFDKSWYAKKDRDKNIHHAVDASIISIFSNETKTLFNQLTQFADYKLFKNTDGSWKKIDPKTGVVTEVTDENWKQIRVRNQVSEIAKVINKCIQDSNIERKARYSRKIENKTNISLFNDTVYSAKKVGYEDQIKRKNLKTLDIHESAEENKNSKVKKQFVYRKLVNVSLLNNDKLADLFAEKEDILMYRANPWVINLAEQIFNEYTENKKIKSQNVFEKYMLDLTKEFPEKFSEAFVKSMLRNKTAIIYNVEKKVVHRIKRLKILSSELKENKLSNVIIRSKNESGTKLSYQDTINSIALMIMRSIDPTAKKQYIRVPLNTLNLHLGDQDFDLHNIDAYLKKPKFVKYLKANEIGDEYKPWRVLTSGTLLIHKKDKKLMYISSFQNLKDVIEIKNLIETEYKENDDSDPKKKKKANRFLMTLSTILNDYILLDAKDNFDILGLSKNRIDEILNSKLGLDKITK

SEQ ID NO: 323 - protein, 1224 aa, Mycoplasma gallisepticum
MNNSIKSKPEVTIGLDLGVGSVGWAIVDNETNIIHHLGSRLFSQAKTAEDRRSFRGARRLIRRRKYKLKRFINLIWKYNSYFGFKNKEDILNNYQEQQKLHNTVLNLKLEALNAKIDPKALSWILHDYLKNRGHFYEDNRDFNVYPTEELANYFGEYGYYKGIIDSKEDNDDKLEEGLTKYKFSNQHWLEEIKKVLSNQTGLPEKFKEEYESLFSYVRNYSEGPGSINSVSPYGIYHLDEKEGKVVQKYNNIWDKTIGKCSIFPDEYRAPKNSPIAMIFNEINELSTIRSYSIYLTGWFINQEFKKAYLNKLLDLLIKTNSEKPIDARQFKKLREETIAESIGKETLKDVEREEKLEKEDHKWKLKGLKLNTNGKIQYNDLSSLAKFVHKLKQHLKLDFLLEDQYTTLDKINFLQSLFVYLGKHLRYSNRVDSANLKEFSDSNKLFERVLQEQKDDLFKLFEQTDKDDEKILAQTHSLSTKAMLLAITRMTNLDNDEDNQKNNDKGWNFEAIKNFDQKFIDITKKNNNLSLKQDKRYLDDRFINDAILSPGVKRILREATKVFNAILKQFSEEYDVTKVVIELARELSEEKELENTKNYEKLIKKNSDKISERLEALDIAEDKIEDILKSPTKSYKVLLWLQQDHIDPYSQKEIAFEDILTKTEKTEIDHIIPYSISFDDSSSNKLLVLAESNQAKSNQTPYEFITSGNAGIKWEDYEAYCRKFKDGDTSLLDSTQRSKKFAKMMKTDTSSKYDIGFLARNLNDTRYATIVFRDALKDYANNHLVEDKPMFKVVCINGGVTSFLRKNFDKSWYAKKDRDKNIHHAVDASIISIFSNETKTLFNQLTQFADYKLFKNTDGSWKKIDPKTGVVTEVTDENWKQIRVRNQVSEIAKVINKCIQDSNIERKARYSRKIENKTNISLFNDTVYSAKKVGYEDQIKRKNLKTLDIHESAEENKNSKVKKQFVYRKLVNVSLLNNDKLADLFAEKEDILMYRANPWVINLAEQIFNEYTENKKIKSQNVFEKYMLDLTKEFPEKFSEAFVKSMLRNKTAIIYNVEKKVVHRIKRLKILSSELKENKLSNVIIRSKNESGTKLSYQDTINSIALMIMRSIDPTAKKQYIRVPLNTLNLHLGDQDFDLHNIDAYLKKPKFVKYLKANEIGDEYKPWRVLTSGTLLIHKKDKKLMYISSFQNLKDVIEIKNLIETEYKENDDSDPKKRRKQIGS

SEQ ID NO: 324 - protein, 1269 aa, Mycoplasma gallisepticum
MNNSIKSKPEVTIGLDLGVGSVGWAIVDNETNIIHHLGSRLFSQAKTAEDRRSFRGVRRLIRRRKYKLKRFVNLIWKYNSYFGFKNKEDILNNYQEQQKLHNTVLNLKSEALNAKIDPKALSWILHDYLKNRGHFYEDNRDFNVYPTKELAKYFDKYGYYKGIIDSKEDNDNKLEEELTKYKFSNKHWLEEVKKVLSNQTGLPEKFKEEYESLFSYVRNYSEGPGSINSVSPYGIYHLDEKEGKVVQKYNNIWDKTIGKCNIFPDEYRAPKNSPIAMIFNEINELSTIRSYSIYLTGWFINQEFKKAYLNKLLDLLIKTNGEKPIDARQFKKLREETIAESIGKETLKDVENEEKLEKEDHKWKLKGLKLNTNGKIQYNDLSSLAKFVHKLKQHLKLDFLLEDQYATLDKINFLQSLFVYLGKHLRYSNRVDSANLKEFSDSNKLFERILQKQKDGLFKLFEQTDKDDEKILAQTHSLSTKAMLLAITRMTNLDNDEDNQKNNDKGWNFEAIKNFDQKFIDITKKNNNLSLKQNKRYLDDRFINDAILSPGVKRILREATKVFNAILKQFSEEYDVTKVVIELARELSEEKELENTKNYKKLIKKNGDKISEGLKALGISEDEIKDILKSPTKSYKFLLWLQQDHIDPYSLKEIAFDDIFTKTEKFEIDHIIPYSISFDDSSSNKLLVLAESNQAKSNQTPYEFISSGNAGIKWEDYEAYCRKFKDGDSSLLDSTQRSKKFAKMMKTDTSSKYDIGFLARNLNDTRYATIVFRDALEDYANNHLVEDKPMFKVVCINGSVTSFLRKNFDDSSYAKKDRDKNIHHAVDASIISIFSNETKTLFNQLTQFADYKLFKNTDGSWKKIDPKTGVVTEVTDENWKQIRVRNQVSEIAKVIEKYIQDSNIERKARYSRKIENKTNISLFNDTVYSAKKVGYEDQIKRKNLKTLDIHESAKENKNSKVKRQFVYRKLVNVSLLNNDKLADLFAEKEDILMYRANPWVINLAEQIFNEYTENKKIKSQNVFEKYMLDLTKEFPEKFSEFLVKSMLRNKTAIIYDDKKNIVHRIKRLKMLSSELKENKLSNVIIRSKNQSGTKLSYQDTINSLALMIMRSIDPTAKKQYIRVPLNTLNLHLGDHDFDLHNMDAYLKKPKFVKYLKANEIGDEYKPWRVLTSGTLLIHKKDKKLMYISSFQNLNDVIEIKNLIETEYKENDDSDSKKKKKANRFLMTLSTILNDYILLDAKDNFDILGLSKNRIDEILNSKLGLDKIVK

SEQ ID NO: 325 - protein, 1269 aa, Mycoplasma gallisepticum str. F; identical to SEQ ID NO: 324

SEQ ID NO: 326 - protein, 1270 aa, Mycoplasma gallisepticum
MNNSIKSKPEVTIGLDLGVGSVGWAIVDNETNIIHHLGSRLFSQAKTAEDRRSFRGVRRLIRRRKYKLKRFVNLIWKYNSYFGFKNKEDILNNYQEQQKLHNTVLNLKLEALNAKIDPKALSWILHDYLKNRGHFYEDNRDFNVYPTEELANYFDEFGYYKGIIDSKNDDDDKLEEGLTKYKFSNQHWLEEVKKVLSNQTGLPEKFKEEYESLFSYVRNYSEGPGSINSVSPYGIYHLDEKEGKVVQKYNNIWDKTIGKCSIFPDEYRAPKNSPIAMIFNEINELSTIRSYSIYLTGWFINQEFKKAYLNKLLDLLIKTNSEKPIDARQFKKLREETIAESIGKETLKDVESEEKLEKDDHKWKLKGLKLNTNGKIQYNDLSSLAKFVHKLKQHLKLDFLLEDQYTPLDKINFLQSLYVYLGKHLRYSNRVDSANLKEFSDSSRLFERVLQEQKDGLFKLFEQTDKDDEKILTQTHSLSTKAMLLAITRMTNLDNDEDNQKNNDKGWNFEAIKNFDQKFIDITKTNNNLSLKQDKRYLDDQFINDAILSPGVKRILREATKVFNAILKQFSEEYDVTKVVIELARELSEEKELENTKNYKKLIKKNGDKISEGLKALGIAEDKIEEILKSPTKSYKVLLWLQQDHIDPYSQKEIAFDDILTKTEKTEIDHIIPYSISFDDSSSNKLLVLAESNQAKSNQTPYEFINSGKAEITWEVYEAYCHKFKNGDSSLLDSTQRSKKFAKMMKTDTSSKYDIGFLARNLNDTRYATIVFRDALKDYANNHLVEDKPMFKVVCINGGVTSFLRKNFDPKSWYAKKDRDKNIHHAVDASIISIFSNETKTLFNQLTKFADYKLFKNTDGSWKKIDPKTGVVSEVTDENWKQIRVRNQVSEIAKVIDKYIQDSNIERKARYSRKIENKTNISLFNDTVYSAKKVGYEDQIKRKNLKTLDIHESAEENKNSKVKKQFVYRKLVNVSLLNNDKLADLFAEKEDILMYRANPWVINLAEQIFNEYTENKKIKSQNVFEKYMLDLTKEFPEKFSEAFVKSMIRNKTAIIYNVEKDVVHRIKRLKILSSELKENKWSNVIIRSKNESGTKLSYQDTINSIALMIMRSIDPTAKKQYIRVPLNTLNLHLGDQDFDLHNIDAYLKKPKFVKYLKANEIGDEYKPWRVLTSGTLLIHKKDKKLMYISSFQNLNDLIEIKNLIETEYKENVDSDPKKKKKASQILRSLSVILNDYILLDAKYNFDILGLSKNKIDEILNSKLDLDKIAK

SEQ ID NO: 327 - protein, 1236 aa, Mycoplasma mobile
MYFYKNKENKLNKKVVLGLDLGIASVGWCLTDISQKEDNKFPIILHGVRLFETVDDSDDKLLNETRRKKRGQRRRNRRLFTRKRDFIKYLIDNNIIELEFDKNPKILVRNFIEKYINPFSKNLELKYKSVTNLPIGFHNLRKAAINEKYKLDKSELIVLLYFYLSLRGAFFDNPEDTKSKEMNKNEIEIFDKNESIKNAEFPIDKIIEFYKISGKIRSTINLKFGHQDYLKEIKQVFEKQNIDFMNYEKFAMEEKSFFSRIRNYSEGPGNEKSFSKYGLYANENGNPELIINEKGQKIYTKIFKTLWESKIGKCSYDKKLYRAPKNSFSAKVFDITNKLTDWKHKNEYISERLKRKILLSRFLNKDSKSAVEKILKEENIKFENLSEIAYNKDDNKINLPIINAYHSLTTIFKKHLINFENYLISNENDLSKLMSFYKQQSEKLFVPNEKGSYEINQNNNVLHIFDAISNILNKFSTIQDRIRILEGYFEFSNLKKDVKSSEIYSEIAKLREFSGTSSLSFGAYYKFIPNLISEGSKNYSTISYEEKALQNQKNNFSHSNLFEKTWVEDLIASPTVKRSLRQTMNLLKEIFKYSEKNNLEIEKIVVEVTRSSNNKHERKKIEGINKYRKEKYEELKKVYDLPNENTTLLKKLWLLRQQQGYDAYSLRKIEANDVINKPWNYDIDHIVPRSISFDDSFSNLVIVNKLDNAKKSNDLSAKQFIEKIYGIEKLKEAKENWGNWYLRNANGKAFNDKGKFIKLYTIDNLDEFDNSDFINRNLSDTSYITNALVNHLTFSNSKYKYSVVSVNGKQTSNLRNQIAFVGIKNNKETEREWKRPEGFKSINSNDFLIREEGKNDVKDDVLIKDRSFNGHHAEDAYFITIISQYFRSFKRIERLNVNYRKETRELDDLEKNNIKFKEKASFDNFLLINALDELNEKLNQMRFSRMVITKKNTQLFNETLYSGKYDKGKNTIKKVEKLNLLDNRTDKIKKIEEFFDEDKLKENELTKLHIFNHDKNLYETLKIIWNEVKIEIKNKNLNEKNYFKYFVNKKLQEGKISFNEWVPILDNDFKIIRKIRYIKFSSEEKETDEIIFSQSNFLKIDQRQNFSFHNTLYWVQIWVYKNQKDQYCFISIDARNSKFEKDEIKINYEKLKTQKEKLQIINEEPILKINKGDLFENEEKELFYIVGRDEKPQKLEIKYILGKKIKDQKQIQKPVKKYFPNWKKVNLTYMGEIFKK

SEQ ID NO: 328 - protein, 1265 aa, Mycoplasma ovipneumoniae SC01
MHNKKNITIGFDLGIASIGWAIIDSTTSKILDWGTRTFEERKTANERRAFRSTRRNIRRKAYRNQRFINLILKYKDLFELKNISDIQRANKKDTENYEKIISFFTEIYKKCAAKHSNILEVKVKALDSKIEKLDLIWILHDYLENRGFFYDLEEENVADKYEGIEHPSILLYDFFKKNGFFKSNSSIPKDLGGYSFSNLQWVNEIKKLFEVQEINPEFSEKFLNLFTSVRDYAKGPGSEHSASEYGIFQKDEKGKVFKKYDNIWDKTIGKCSFFVEENRSPVNYPSYEIFNLLNQLINLSTDLKTTNKKIWQLSSNDRNELLDELLKVKEKAKIISISLKKNEIKKIILKDFGFEKSDIDDQDTIEGRKIIKEEPTTKLEVTKHLLATIYSHSSDSNWININNILEFLPYLDAICIILDREKSRGQDEVLKKLTEKNIFEVLKIDREKQLDFVKSIFSNTKFNFKKIGNFSLKAIREFLPKMFEQNKNSEYLKWKDEEIRRKWEEQKSKLGKTDKKTKYLNPRIFQDEIISPGTKNTFEQAVLVLNQIIKKYSKENIIDAIIIESPREKNDKKTIEEIKKRNKKGKGKTLEKLFQILNLENKGYKLSDLETKPAKLLDRLRFYHQQDGIDLYTLDKINIDQLINGSQKYEIEHIIPYSMSYDNSQANKILTEKAENLKKGKLIASEYIKRNGDEFYNKYYEKAKELFINKYKKNKKLDSYVDLDEDSAKNRFRFLTLQDYDEFQVEFLARNLNDTRYSTKLFYHALVEHFENNEFFTYIDENSSKHKVKISTIKGHVTKYFRAKPVQKNNGPNENLNNNKPEKIEKNRENNEHHAVDAAIVAIIGNKNPQIANLLTLADNKTDKKFLLHDENYKENIETGELVKIPKFEVDKLAKVEDLKKIIQEKYEEAKKHTAIKFSRKTRTILNGGLSDETLYGFKYDEKEDKYFKIIKKKLVTSKNEELKKYFENPFGKKADGKSEYTVLMAQSHLSEFNKLKEIFEKYNGFSNKTGNAFVEYMNDLALKEPTLKAEIESAKSVEKLLYYNFKPSDQFTYHDNINNKSFKRFYKNIRIIEYKSIPIKFKILSKHDGGKSFKDTLFSLYSLVYKVYENGKESYKSIPVTSQMRNFGIDEFDFLDENLYNKEKLDIYKSDFAKPIPVNCKPVFVLKKGSILKKKSLDIDDFKETKETEEGNYYFISTISKRFNRDTAYGLKPLKLSVVKPVAEPSTNPIFKEYIPIHLDELGNEYPVKIKEHTDDEKLMCTIK

SEQ ID NO: 329 - protein, 1314 aa, Mycoplasma synoviae
MLRLYCANNLVLNNVQNLWKYLLLLIFDKKIIFLFKIKVILIRRYMENNNKEKIVIGFDLGVASVGWSIVNAETKEVIDLGVRLFSEPEKADYRRAKRTTRRLLRRKKFKREKFHKLILKNAEIFGLQSRNEILNVYKDQSSKYRNILKLKINALKEEIKPSELVWILRDYLQNRGYFYKNEKLTDEFVSNSFPSKKLHEHYEKYGFFRGSVKLDNKLDNKKDKAKEKDEEEESDAKKESEELIFSNKQWINEIVKVFENQSYLTESFKEEYLKLFNYVRPFNKGPGSKNSRTAYGVFSTDIDPETNKFKDYSNIWDKTIGKCSLFEEEIRAPKNLPSALIFNLQNEICTIKNEFTEFKNWWLNAEQKSEILKFVFTELFNWKDKKYSDKKFNKNLQDKIKKYLLNFALENFNLNEEILKNRDLENDTVLGLKGVKYYEKSNATADAALEFSSLKPLYVFIKFLKEKKLDLNYLLGLENTEILYFLDSIYLAISYSSDLKERNEWFKKLLKELYPKIKNNNLEIIENVEDIFEITDQEKFESFSKTHSLSREAFNHIIPLLLSNNEGKNYESLKHSNEELKKRTEKAELKAQQNQKYLKDNFLKEALVPLSVKTSVLQAIKIFNQIIKNFGKKYEISQVVIEMARELTKPNLEKLLNNATNSNIKILKEKLDQTEKFDDFTKKKFIDKIENSVVFRNKLFLWFEQDRKDPYTQLDIKINEIEDETEIDHVIPYSKSADDSWFNKLLVKKSTNQLKKNKTVWEYYQNESDPEAKWNKFVAWAKRIYLVQKSDKESKDNSEKNSIFKNKKPNLKFKNITKKLFDPYKDLGFLARNLNDTRYATKVFRDQLNNYSKHHSKDDENKLFKVVCMNGSITSFLRKSMWRKNEEQVYRFNFWKKDRDQFFHHAVDASIIAIFSLLTKTLYNKLRVYESYDVQRREDGVYLINKETGEVKKADKDYWKDQHNFLKIRENAIEIKNVLNNVDFQNQVRYSRKANTKLNTQLFNETLYGVKEFENNFYKLEKVNLFSRKDLRKFILEDLNEESEKNKKNENGSRKRILTEKYIVDEILQILENEEFKDSKSDINALNKYMDSLPSKFSEFFSQDFINKCKKENSLILTFDAIKHNDPKKVIKIKNLKFFREDATLKNKQAVHKDSKNQIKSFYESYKCVGFIWLKNKNDLEESIFVPINSRVIHFGDKDKDIFDFDSYNKEKLLNEINLKRPENKKFNSINEIEFVKFVKPGALLLNFENQQIYYISTLESSSLRAKIKLLNKMDKGKAVSMKKITNPDEYKIIEHVNPLGINLNWTKKLENNN

SEQ ID NO: 330 - protein, 1304 aa, Mycoplasma synoviae 53
MLNNVQNLWKYLLLLIFDKKIIFLFKIKVILIRRYMENNNKEKIVIGFDLGVASVGWSIVNAETKEVIDLGVRLFSEPEKADYRRAKRTTRRLLRRKKFKREKFHKLILKNAEIFGLQSRNEILNVYKDQSSKYRNILKLKINALKEEIKPSELVWILRDYLQNRGYFYKNEKLTDEFVSNSFPSKKLHEHYEKYGFFRGSVKLDNKLDNKKDKAKEKDEEEESDAKKESEELIFSNKQWINEIVKVFENQSYLTESFKEEYLKLFNYVRPFNKGPGSKNSRTAYGVFSTDIDPETNKFKDYSNIWDKTIGKCSLFEEEIRAPKNLPSALIFNLQNEICTIKNEFTEFKNWWLNAEQKSEILKFVFTELFNWKDKKYSDKKFNKNLQDKIKKYLLNFALENFNLNEEILKNRDLENDTVLGLKGVKYYEKSNATADAALEFSSLKPLYVFIKFLKEKKLDLNYLLGLENTEILYFLDSIYLAISYSSDLKERNEWFKKLLKELYPKIKNNNLEIIENVEDIFEITDQEKFESFSKTHSLSREAFNHIIPLLLSNNEGKNYESLKHSNEELKKRTEKAELKAQQNQKYLKDNFLKEALVPLSVKTSVLQAIKIFNQIIKNFGKKYEISQVVIEMARELTKPNLEKLLNNATNSNIKILKEKLDQTEKFDDFTKKKFIDKIENSVVFRNKLFLWFEQDRKDPYTQLDIKINEIEDETEIDHVIPYSKSADDSWFNKLLVKKSTNQLKKNKTVWEYYQNESDPEAKWNKFVAWAKRIYLVQKSDKESKDNSEKNSIFKNKKPNLKFKNITKKLFDPYKDLGFLARNLNDTRYATKVFRDQLNNYSKHHSKDDENKLFKVVCMNGSITSFLRKSMWRKNEEQVYRFNFWKKDRDQFFHHAVDASIIAIFSLLTKTLYNKLRVYESYDVQRREDGVYLINKETGEVKKADKDYWKDQHNFLKIRENAIEIKNVLNNVDFQNQVRYSRKANTKLNTQLFNETLYGVKEFENNFYKLEKVNLFSRKDLRKFILEDLNEESEKNKKNENGSRKRILTEKYIVDEILQILENEEFKDSKSDINALNKYMDSLPSKFSEFFSQDFINKCKKENSLILTFDAIKHNDPKKVIKIKNLKFFREDATLKNKQAVHKDSKNQIKSFYESYKCVGFIWLKNKNDLEESIFVPINSRVIHFGDKDKDIFDFDSYNKEKLLNEINLKRPENKKFNSINEIEFVKFVKPGALLLNFENQQIYYISTLESSSLRAKIKLLNKMDKGKAVSMKKITNPDEYKIIEHVNPLGINLNWTKKLENNN

SEQ ID NO: 331 - protein, 1401 aa, Myroides injenensis M09-0166
MKRILGLDLGTTSIGWAYVHEAENVNETSSIQKVGVRVNPLTTEEQTNFEKGKPITTNASRTLARSARRNLQRYKLRRDNLIQILKENNWINNTTSLTETGNHSTFETYELRNKAASEKLTLDQLSRVLLMLNKKRGYKSSRKVNSKEEGQLIDGMEVAKKLYHEQLTPGQLSLQLMNQGVKKLPDYYRSDLNQELESIWNFQQQFYPNILTDKFKEEINGKGLTSTSSAFWNIYNFNTAENKGSRDEKKKQALQWRSEALSKQLSKEIVAYIIADLNGQIYNSSGYLGAISDRSKELYFNNLTVGQYLFKQLKSNPHTSLKNQVFYRQDYLNEFEKIWETQSKFYPKELTAALKREIRDVIIFYQRKLKSQKGLISFCEFEQKQKTINGKTKTIGHRVIPKSSPLFQEFKIWQQLHNVVLRNKKTNEIVSLADEQKVHLFEELNLKGKLKSNQVLKLIENKPKDWELNYTELEGNNTNKALYNAYLDILDIEGYDVRNELKVKLNKDDIELSDLDVNASEIKEMIFSVFKHLGINTEILEFDATLEDKVFEKQASYQLWHLLYSYEEDNSPTGLDRLYNLLHKKFGFKLNHAKLIGNVLFQDDYGSLSSKAIKNIFPYITENNYYTACELAGYKHSKHSLTKEENETRELKNRLTILPKNSLRNPVVEKIINQMINVVNTLIDEENNILIAQGKEPNFQFDEIRIELARELKKNAKEREELTKSINKSKTDHEKIIKILQKEDGIKNPTRNDIVRFKLYSELKNNGYKDLYTNEYIERKDIFTKEYDIEHIIPQSKLFDDSFSNKTLVRRNVNLKKGNQTAYDFILCEYGQEKANEFETRITNLYNLGKDEGISKSKFKKLLMQESEIGNGFIERDLRETQYIAKKAKSLLLEITRNVISTSGSITDRLREDWGLINVMKELNLQKYRDAGLTEFVKMKDGNKKEVIIDWTKRNDHRHHAMDALTIAFTKHNHIQYLNHLNARKNVNNELHNNIIAIEKLETTLVSDERGNKKRIFKEPIANFRTIAKSHLEAILVSHKAKNKVVTKNINKISGKKISQQTLTPRGQLHKETIYGKIRQYVSKQEKVGPKFTIEVIEQVSNPTYRNLLLKRLEENNNDPKKAFGGKNSLNKNPIYINLEKNIKVPEVLKLVWLEDNYTIRKEISPDLKIDKVIDQGVKQILQNRLAQYKGDSKLAFSNLDANPIWLNEDKGIAIKRVTISGIATAQPLHRKKDHLGQPILDHNGQEIPVDFISTGNNHHVAIYEDENGKLQESVVSHFEAVERVNQKLPIIDKTFNQHLGWKFLFTMKQNELFLFPSDDFNPNEIDLFDKQNYTVISKHLFRIQKLSTKDYSFRHHLETNVEEIKDLKTITWRREGLNGIQNIIKVRTNHLGEIIHIGEY

SEQ ID NO: 332 - protein, 1466 aa, Myroides odoratus DSM 2801
MKNILGLDLGTNSIGWALVKEDFENKQGEILGLGSRIIPMSQDILGEFGRGNSISQTADRTGYRGVRRLRERHLLRRERLHRVLNILGFLPNHYAKEIDFTKRLGKFINHAEPKLSFDKEFIFKDSFNEMLKDFQQNQPGFIINKHGEEALVPYDWTIYYLRKKALTQKIDKEELAWILLNFNQKRGYYQLRGEEEEENTNKLVEFYSLKIIDVIADNEVNKKGEVWYSLHLENGWIYRRSSKISLVDWKDKVRDFIVTTDVNDDGSEKLDKDGVVKRSFRAPSADDWTLLKKKTEQDIDNSNKTVGAYIYENLLLNPKQKIKGKLVRTIERKFYKDELKQILEKQKEFHQELQNEQLLQDCVRELYKYNEQHQQMLESKDFVHLFLNDIIFYQRPLRSQKSLISNCTLEKRVSRDGVVFPIKVISKSNPYYQEFRLLQWLQNLAIYRKDDDVNVTQEFLNSIESWENLLQFLNAKKEIKQEQLIKFLLEQKGLKGNSLKTAILTYRWNYVTDKVYPMNETRSLIQDKLKKVENVATDFLSFDNEMALWHIIYSVNDKIEYEKALAKFASKHNLDEISFVESFKKFPPFKSDYGSFSEKAIKKLLPLMRFGSVWNKNNIVPSVLDRIDKILTGEYDEKIKIRVREKAEQFQLNQIEDFQNLPLWLAQYVVYDRHSEAEIAGKWNSVKDLENYLKEFKQHSLRNPIVEQIITETLRVVKDIWQQYGNGVQNFFDEIHIELGREMKNTADERKRITNSVTENENTNLRIKALLVELKEDTNIENVRPHSPMQQEILKIYEEGVLNAVENIDEDILKISKTAQPSKSELIRYKLWLEQKYQSPYTGEMIPLSRLFTSDYEIEHVIPQSRYFDDSLSNKVICEAAVNKRKDNQLGLEFIKNHHSEKIELGNGRTAQVLEVEAYESFVKKNYDKNRGKRNKLLLEDVPEKMIERQLNDTRYISKFVTHLLSNIVRKDEVNSKDDGINSKNIIPGNGKITSQLKQDWGLNDVWNELILPRFERMNNLTNSTDFTSTNTNGKIIPTVPLEYSKGFSKKRIDHRHHALDALVIALATRDHVNLLNNESALPKKDRTKEEQKSFRFDLQVNLRNKEKYFNVKEGREKEKFTTFKKPWNTLTQDTRDALENMVVSFKQNLRVINKATNYYESYTDENGNLRLDKYGNPKKELISQKGTNWAIRKSLHKETVSGQIHLDRVKVTKGKIVTATRKSLDSSFNEKSIESITDTGIQKILRNYLKAKDNKPDVAFSPEGIEELNKSISVYNEGKNHQPIIKVRIFEQGSKFPVGETGNKIAKFVEAAKGTNLFFGIYQDKTGKRSYDTIPLNLVIERLKQGLSPVPETNEKGHQLLFHLSPNDLVYVPTIDDNEQLDSNRVYKFTDSSDTTCNFIPSNISAIIFNINSKEQEKRGINYPIQNELGVGSPQSKNQKSFDGFMIKEVCIKLKVDRLGNISKT

SEQ ID NO: 333 - protein, 1077 aa, Neisseria bacilliformis ATCC BAA-1200
MQQKPQRYILGLDLGIASVGWACVWADENEHPTGLLDCGVRTFERAEVPKTGDSLALARRQARSVRRLIRRRAHRLLRLRRLLKREGVLLSADFNENGLVRGLPIDAWALRVAGLDRKLSNKEWAAVLLHLVKHRGYLSQRKNETQSKDKELGRLLAGVNGNREALQNRSDEYRTAAELAVKKFAAENNGSLRNKGGDYSHTFDRKDLQRELHLLFERQRALDNPFTSSEMEAAVDELLMKQRSALQGEAVLKMLGRCTFEPSEYKAAKNTYSAERFVWLTKLNNLRIQYNGEERALSEAERRLLLDEPYQKAKLTYKQVRTILELPESAVFKGLRYGHGEDGLKAESGTLMEMKAYHAVRKALKDAGLEGEWENRIRNPELLDAIGTAFSLYKTDEDIRANLAAFRLSENVLEALLAGLNFDKFVHLSLKALAKILPLMEQGMRYDEACKEAYGDHYGAKEQEDHRLLPPFVADDIRNPVVFRTLTQARKIVNEIVRRYGSPLRVHIETGREVGKSFSDRKEIEKRQEENRKERERAAAHFKELFPNFAGEPKAQDILKLRLYEQQHGKCLYSGKEIDLRRLPEKGYVEIDHALPFSRTWDDSFNNKVLVLGKENQDKRNRTPYEYLDGKGNSGAWRAFAERVSGCRFPYAKKQRLLTQKLDEKTEQGFLERNLNDTRYVARFLCQFIEEKMHLEGAGKKRVFASNGQITALLRGFWGLKKVREENDRHHALDAVVVACSSVSMQQKITRHFRYREELEHIDRETGEVIHGFPQPWEFFRQEVMTRVFSDDPVSELAEKLDSRPEAVHEFVTPLFVSRAPHRKVTGQGHLETIRSAKRLDEKISVVKLPLTQLKTKDIERIVGYPNREPALYDALAARLAAFKDDPAKAFSEPFYKTGKDGKCGVLVKAVRVENVQKSGLLVRKDESGKMQGVADNATMVRVDVFGKNGKNYLVPVYAWQVEKGELPNRAVVAYADEEDWDEMDDSFEFKFSLYPNDLVEVVTKKDKFFGYYSGFNRATGAINIKEHDLSKSKVKNGVYEGIGVKTAQSFQKYQVDTLGKTIRLCKPEKRMGFKKK

SEQ ID NO: 334 - protein, 1082 aa, Neisseria cinerea ATCC 14685
MAAFKPNPMNYILGLDIGIASVGWAIVEIDEEENPIRLIDLGVRVFERAEVPKTGDSLAAARRLARSVRRLTRRRAHRLLRARRLLKREGVLQAADFDENGLIKSLPNTPWQLRAAALDRKLTPLEWSAVLLHLIKHRGYLSQRKNEGETADKELGALLKGVADNTHALQTGDFRTPAELALNKFEKESGHIRNQRGDYSHTFNRKDLQAELNLLFEKQKEFGNPHVSDGLKEGIETLLMTQRPALSGDAVQKMLGHCTFEPTEPKAAKNTYTAERFVWLTKLNNLRILEQGSERPLTDTERATLMDEPYRKSKLTYAQARKLLDLDDTAFFKGLRYGKDNAEASTLMEMKAYHAISRALEKEGLKDKKSPLNLSPELQDEIGTAFSLFKTDEDITGRLKDRVQPEILEALLKHISFDKFVQISLKALRRIVPLMEQGNRYDEACTEIYGDHYGKKNTEEKIYLPPIPADEIRNPVVLRALSQARKVINGVVRRYGSPARIHIETAREVGKSFKDRKEIEKRQEENRKDREKSAAKFREYFPNFVGEPKSKDILKLRLYEQQHGKCLYSGKEINLGRLNEKGYVEIDHALPFSRTWDDSFNNKVLALGSENQNKGNQTPYEYFNGKDNSREWQEFKARVETSRFPRSKKQRILLQKFDEDGFKERNLNDTRYINRFLCQFVADHMLLTGKGKRRVFASNGQITNLLRGFWGLRKVRAENDRHHALDAVVVACSTIAMQQKITRFVRYKEMNAFDGKTIDKETGEVLHQKAHFPQPWEFFAQEVMIRVFGKPDGKPEFEEADTPEKLRTLLAEKLSSRPEAVHKYVTPLFISRAPNRKMSGQGHMETVKSAKRLDEGISVLRVPLTQLKLKDLEKMVNREREPKLYEALKARLEAHKDDPAKAFAEPFYKYDKAGNRTQQVKAVRVEQVQKTGVWVHNHNGIADNATIVRVDVFEKGGKYYLVPIYSWQVAKGILPDRAVVQGKDEEDWTVMDDSFEFKFVLYANDLIKLTAKKNEFLGYFVSLNRATGAIDIRTHDTDSTKGKNGIFQSVGVKTALSFQKYQIDELGKEIRPCRLKKRPPVR

SEQ ID NO: 335 - protein, 1081 aa, Neisseria flavescens SK114
MTAFKPNPINYILGLDIGIASVGWAMVEIDEEENPIRLIDLGVRVFERAEVPKTGDSLAAARRLARSVRRLTRRRAHRLLRARRLLKREGVLQAADFDENGLIKSLPNTPWQLRAAALDRKLTPLEWSAVLLHLIKHRGYLSQRKNEGETADKELGALLKGVADNAHALQTGDFRTPAELAVNKFEKESGHIRNQRGDYSHTFSRKDLQAELVLLFEKQKEFGNPHISDGLKEGIETLLMAQRPALSGDAVQKMLGYCTFEPTEPKAAKNTYTAERFIWLTKLNNLRILEQGSERPLTDTERATLIDMPYKNKLTYAKARELLGLDDTAFFKGLRYGKDNAESATLMEMKAYHAIRRALEKEGLKDKKSPLSLSPELQDEIGTAFSLFKTDEDITGRLKGCLQPEILDALLKHINFDKFVQISLKALRRIVPLMEQGKRYDEACAETYGDHYGEKNSEEMLYLPPIPADEIRNPVVLRALSQARKVINGVVRRYGSPARIHIETAREVGKSFKDRKEIEKRQEENRKDREKAAAKFREYFPNFVGEPKSKDILKLRLYEQQHGKCLYSGKAIDIRRLNGKGYVEIDHALPFSRTWDDSFNNKVLVLGSENQNKGNRTPYEYLNGKDNSREWLEFKARVETSRFPHSKKQRVLLQKFDEKGFKERNLNDTRYVNRFLCQFVADHMQLTGKGKRRVFASNGQITNLLRGFWGLHKVRAENDRHHALDAVVVACSTVAMQQKITCFVRYKEMNAFDGKTVDKETGEVLHQKTHFPQPWEFFAQEVMIRVFGKPDGKPEFEEADTPEKLRALLAEKLSSRPEAVHEYVTPLFVSRAPNRKMSGAHKDTLRSAKRFVKHNEKISVKRVWLTEIKLADLENMVNYKNGREIELYEALKARLGAYGGNAKQAFDPKDNPFYKKGGQLVKAVRVEKTQESGVLLNKKNAYTIADNGDMVRVDVFCKVDKKGKNQYFIVPIYAWQVAENILPDIDCKGYRIDDSYTFCFSLHKYDLIAFQKDEKSKVEFAYYINCDSSNGRFYLAWHDKGSKEQQFRISTQNLVLMQKYQIDELGKEIRPCRLKKRPPVR

SEQ ID NO: 336 - protein, 1082 aa, Neisseria lactamica
MAAFKPNPMNYILGLDIGIASVGWAMVEIDKEENPIRLIDLGVRVFERAEVPKTGDSLAMARRLARSVRRLTRRRAHRLLRARRLLKREGVLQDADFDENGLVKSLPNTPWQLRAAALDRKLTCLEWSAVLLHLIKHRGYLSQRKNEGETADKELGALLKGVADNAHALQTGDFRTPAELALNKFEKESGHIRNQRGDYSHTFSRKDLQAELNLLFEKQKEFSNPHVSDSLKEGIETLLMAQRPALSGDAVQKMLGHCTFEPAEPKAAKNTYTAERFIWLTKLNNLRILEQGSERPLTDTERATLMDEPYRKSKLTYAQARKLLGLEDTAFFKGLRYGKDNAEAPTLMEMKAYHAISRALEKEGLKDKKSPLNLSTELQDEIGTAFSLFKTDKDITGRLKDRVQPEILEALLKHISFDKFVQISLKALRRIVPLMEQGKRYDEACAEIYGDHYCKKNAEEKIYLPPIPADEIRNPVVLRALSQARKVINCVVRRYGSPARIHIETAREVGKSFKDRKEIEKRQEENRKDREKAAAKFREYFPNFVGEPKSKDILKLRLYEQQHGKCLYSGKEINLVRLNEKGYVEIDHALPFSRTWDDSFNNKVLVLGSENQNKGNQTPYEYFNGKDNSREWQEFKARVETSRFPRSKKQRILLQKFDEEGFKERNLNDTRYVNRFLCQFVADHILLTGKGKRRVFASNGQITNLLRGFWGLRKVRAENDRHHALDAVVVACSTVAMQQKITRFVRYKEMNAFDGKTIDKETGEVLHQKAHFPQPWEFFAQEVMIRVFGKPDGKPEFEEADTPEKLRTLLAEKLSSRPEAVHEYVTPLFVSRAPNRKMSGQGHMETVKSAKRLDEGISVLRVPLTQLKLKGLEKMVNREREPKLYDALKAQLETHKDNPAKAFAEPFYKYDKAGNRTQQVKAVRIEQVQKTGVWVRNHNGIADNATMVRVDVFEKGGKYYLVPIYSWQVAKGILPDRAVVAFKDEEDWTVMDDSFEFRFVLYANDLIKLTAKKNEFLGYFVSLNRATGAIDIRTHDTDSTKGKNGIFQSVGVKTALSFQKNQIDELGKEIRPCRLKKRPPVR

SEQ ID NO: 337 - protein, 1082 aa, Neisseria meningitidis
MAAFKPNPINYILGLDIGIASVGWAMVEIDEDENPICLIDLGVRVFERAEVPKTGDSLAMARRLARSVRRLTRRRAHRLLRARRLLKREGVLQAADFDENGLIKSLPNTPWQLRAAALDRKLTPLEWSAVLLHLIKHRGYLSQRKNEGETADKELGALLKGVADNAHALQTGDFRTPAELALNKFEKESGHIRNQRGDYSHTFSRKDLQAELNLLFEKQKEFGNPHISDGLKEGIETLLMTQRPALSGDAVQKMLGHCTFEPAEPKAAKNTYTAERFIWLTKLNNLRILEQGSERPLTDTERTTLIDEPYRKSKLTYAQARKLLELDNTAFFKGLRYGKDNAEASTLMEMKAYHAISRALEKEGLKDKKSPLNLSPELQDEIGTAFSLFKTDEDITGRLKDRVQPEILEALLKHISFDKFVQISLKALRRIVPLMEQGKRYDEACAEIYGDHYGKKNTEEKIDLPPIPADEIRNPVVLRALSQARKVINGVVRRYGSPARIHIETAREVGKSFKDRKEIEKRQEENRKDREKAATKFREYFPNFVGEPKSKDILKLRLYEQQHGKCLYSGKEINLGRLNEKGYVEIDHALPFSRTWDDSFNNKVLVLGSENQNKGNQTPYEYFNGKDNSREWQEFKARVETSRFPRSKKQRILLQKFDEEGFKERNLNDTRYVNRFLCQFVADHMLLTGKGKRRVFASNGQITNLLRGFWGLRKVRAENDRHHALDAVVVACSTVAMQQKITRFVRYKEMNAFDGKTIDKETGEVLHQKTHFPQPWEFFAQEVMIRVFGKPDGKPEFEEADTPEKLRTLLAEKLSSRPEAVHEYVTPLFVSRAPNRKMSGQGHMETVKSAKRLDEGVSVLRVPLTQLKLKDLEKMVNREREPKLYEALKARLEAHKDDPAKAFAEPFYKYDKAGNRTQQVKAVRVEQVQKTGVWVRNHNGIADNATMVRVDVFEKGDKYYLVPIYSWQVAKGILPDRAVVQGKDEEDWQLIDDSFNFKFSLHPNDLVEVITKKARMFGYFASCHRGTGNINIRIHDLDHKIGKNGILEGIGVKTALSFQKYQIDELGKEIRPCRLKKRPPVR

SEQ ID NO: 338 - protein, 1082 aa, Neisseria meningitidis 2007056
MAAFKPNPINYILGLDIGIASVGWAMVEIDEDENPICLIDLGVRVFERAEVPKTGDSLAMARRLARSVRRLTRRRAHRLLRARRLLKREGVLQAADFDENGLIKSLPNTPWQLRAAALDRKLTPLEWSAVLLHLIKHRGYLSQRKNEGETADKELGALLKGVADNAHALQTGDFRTPAELALNKFEKESGHIRNQRGDYSHTFSRKDLQAELILLFEKQKEFGNPHVSGGLKEGIETLLMTQRPALSGDAVQKMLGHCTFEPAEPKAAKNTYTAERFIWLTKLNNLRILEQGSERPLTDTERATLMDEPYRKSKLTYAQARKLLGLEDTAFFKGLRYGKDNAEASTLMEMKAYHAISRALEKEGLKDKKSPLNLSPELQDEIGTAFSLFKTDEDITGRLKDRIQPEILEALLKHISFDKFVQISLKALRRIVPLMEQGKRYDEACAEIYGDHYGKKNTEEKIYLPPIPADEIRNPVVLRALSQARKVINGVVRRYGSPARIHIETAREVGKSFKDRKEIEKRQEENRKDREKAAAKFREYFPNFVGEPKSKDILKLRLYEQQHGKCLYSGKEINLGRLNEKGYVEIDHALPFSRTWDDSFNNKVLVLGSENQNKGNQTPYEYFNGKDNSREWQEFKARVETSRFPRSKKQRILLQKFDEDGFKERNLNDTRYVNRFLCQFVADRMRLTGKGKKRVFASNGQITNLLRGFWGLRKVRAENDRHHALDAVVVACSTVAMQQKITRFVRYKEMNAFDGKTIDKETGEVLHQKTHFPQPWEFFAQEVMIRVFGKPDGKPEFEEADTPEKLRTLLAEKLSSRPEAVHEYVTPLFVSRAPNRKMSGQGHMETVKSAKRLDEGVSVLRVPLTQLKLKDLEKMVNREREPKLYEALKARLEAHKDDPAKAFAEPFYKYDKAGNRTQQVKAVRVEQVQKTGVWVRNHNGIADNATMVRVDVFEKGDKYYLVPIYSWQVAKGILPDRAVVQGKDEEDWQLIDDSFNFKFSLHPNDLVEVITKKARMFGYFASCHRGTGNINIRIHDLDHKIGKNGILEGIGVKTALSFQKYQIDELGEEIRPCRLKKRPPVR

SEQ ID NO: 339 - protein, 1082 aa, Neisseria meningitidis 63049
MAAFKPNPINYILGLDIGIASVGWAMVEIDEEENPIRLIDLSVRVFERAEVPKTGDSLAMARRLARSVRRLTRRRAHRLLRARRLLKREGVLQAADFDENGLIKSLPNTPWQLRAAALDRKLTPLEWSAVLLHLIKHRGYLSQRKNEGETADKELGALLKGVADNAHALQTGDFRTPAELALNKFEKESGHIRNQRGDYSHTFSRKDLQAELILLFEKQKEFGNPHVSGGLKEGIETLLMTQRPALSGDAVQKMLGHCTFEPAEPKAAKNTYTAERFVWLTKLNNLRILEQGSERPLTDTERATLMDEPYRKSKLTYAQARKLLGLEDTAFFKGLRYGKDNAEASTLMEMKAYHAISRALEKEGLKDKKSPLRLSPELQDEIGTAFSLFKTDEDITGRLKDRVQPEILEALLKHISFDKFVQISLKALRRIVPLMEQGKRYDEACAEIYGDHYGKKNAEEKIYLPPIPADEIRNPVVLRALSQARKVINGVVRRYGSPARIHIETAREVGKSFKDRKEIEKRQEENRKDREKAAAKFREYFPNFVGEPKSKDILKLRLYEQQHGKCLYSGKEINLGRLNEKGYVEIDHALPFSRTWDDSFNNKVLVLGSENQNKGNQTPYEYFNGKDNSREWQEFKARVETSRFPRSKKQRILLQKFDEDGFKERNLNDTRYVNRFLCQFVADRMRLTGKGKKRVFASNGQITNLLRGFWGLRKVRAENDRHHALDAVVVACSTVAMQQKITRFVRYKEMNAFDGKTIDKETGEVLHQKTHFPQPWEFFAQEVMIRVFGKPDGKPEFEEADTPEKLRTLLAEKLSSRPEAVHEYVTPLFVSRAPNRKMSGQGHMETVKSAKRLDEGVSVLRVPLTQLKLKDLEKMVNREREPKLYEALKARLEAHKDDPAKAFAEPFYKYDKAGNRTQQVKAVRVEQVQKTGVWVRNHNGIADNATMVRVDVFEKGDKYYLVPIYSWQVAKGILPDRAVVQGKDEEDWQLIDDSFNFKFSLHPNDLVEVITKKARMFGYFASCHRGTGNINIRIHDLDHKIGKNGILEGIGVKTALSFQKYQIDELGKEIRPCRLKKRPPVR

SEQ ID NO: 340 - protein, 1082 aa, Neisseria meningitidis
MAAFKPNSINYILGLDIGIASVGWAMVEIDEEENPIRLIDLGVRVFERAEVPKTGDSLAMARRLARSVRRLTRRRAHRLLRTRRLLKREGVLQAANFDENGLIKSLPNTPWQLRAAALDRKLTPLEWSAVLLHLIKHRGYLSQRKNEGETADKELGALLKGVAGNAHALQTGDFRTPAELALNKFEKESGHIRNQRSDYSHTFSRKDLQAELILLFEKQKEFGNPHVSGGLKEGIETLLMTQRPALSGDAVQKMLGHCTFEPAEPKAAKNTYTAERFIWLTKLNNLRILEQGSERPLTDTERATLMDEPYRKSKLTYAQARKLLGLEDTAFFKGLRYGKDNAEASTLMEMKAYHAISRALEKEGLKDKKSPLNLSPELQDEIGTAFSLFKTDEDITGRLKDRIQPEILEALLKHISFDKFVQISLKALRRIVPLMEQGKRYDEACAEIYGDHYGKKNTEEKIYLPPIPADEIRNPVVLRALSQARKVINGVVRRYGSPARIHIETAREVGKSFKDRKEIEKRQEENRKDREKAAAKFREYFPNFVGEPKSKDILKLRLYEQQHGKCLYSGKEINLGRLNEKGYVEIDHALPFSRTWDDSFNNKVLVLGSENQNKGNQTPYEYFNGKDNSREWQEFKARVETSRFPRSKKQRILLQKFDEDGFKERNLNDTRYVNRFLCQFVADRMRLTGKGKKRVFASNGQITNLLRGFWGLRKVRAENDRHHALDAVVVACSTVAMQQKITRFVRYKEMNAFDGKTIDKETGEVLHQKTHFPQPWEFFAQEVMIRVFGKPDGKPEFEEADTLEKLRTLLAEKLSSRPEAVHEYVTPLFVSRAPNRKMSGQGHMETVKSAKRLDEGVSVLRVPLTQLKLKDLEKMVNREREPKLYEALKARLEAHKDDPAKAFAEPFYKYDKAGNRTQQVKAVRVEQVQKTGVWVRNHNGIADNATMVRVDVFEKGDKYYLVPIYSWQVAKGILPDRAVVQGKDEEDWQLIDDSFNFKFSLHPNDLVEVITKKARMFGYFASCHRGTGNINIRIHDLDHKIGKNGILEGIGVKTALSFQKYQIDELGKEIRPCRLKKRPPVR

SEQ ID NO: 341 - protein, 1082 aa, Neisseria meningitidis 92045
MAAFKPNPINYILGLDIGIASVGWAMVEIDEEENPIRLIDLGVRVFERAEVPKTGDSLAMARRLARSVRRLTRRRAHRLLRARRLLKREGVLQAADFDENGLIKSLPNTPWQLRAAALDRKLTPLEWSAVLLHLIKHRGYLSQRKNEGETADKELGALLKGVADNAHALQTGDFRTPAELALNKFEKECGHIRNQRGDYSHTFSRKDLQAELNLLFEKQKEFGNPHVSGGLKEGIETLLMTQRPALSGDAVQKMLGHCTFEPAEPKAAKNTYTAERFIWLTKLNNLRILEQGSERPLTDTERATLMDEPYRKSKLTYAQARKLLGLEDTAFFKGLRYGKDNAEASTLMEMKAYHAISRALEKEGLKDKKSPLNLSPELQDEIGTAFSLFKTDEDITGRLKDRIQPEILEALLKHISFDKFVQISLKALRRIVPLMEQGKRYDEACAEIYGDHYGKKNTEEKIYLPPIPADEIRNPVVLRALSQARKVINGVVRRYGSPARIHIETAREVGKSFKDRKEIEKRQEENRKDREKAAAKFREYFPNFVGEPKSKDILKLRLYEQQHGKCLYSGKEINLVRLNEKGYVEIDHALPFSRTWDDSFNNKVLVLGSENQNKGNQTPYEYFNGKDNSREWQEFKARVETSRFPRSKKQRILLQKFDEEGFKERNLNDTRYVNRFLCQFVADHILLTGKGKRRVFASNGQITNLLRGFWGLRKVRAENDRHHALDAVVVACSTVAMQQKITRFVRYKEMNAFDGKTIDKETGEVLHQKTHFPQPWEFFAQEVMIRVFGKPDGKPEFEEADTPEKLRTLLAEKLSSRPEAVHEYVTPLFVSRAPNRKMSGQGHMETVKSAKRLDEGVSVLRVPLTQLKLKDLEKMVNREREPKLYEALKARLEAHKDDPAKAFAEPFYKYDKAGNRTQQVKAVRVEQVQKTGVWVRNHNGIADNATMVRVDVFEKGGKYYLVPIYSWQVAKGILPDRAVVQGKDEEDWQLIDDSFNFKFSLHPNDLVEVITKKARMFGYFASCHRGTGNINIRIHDLDHKIGKNGILEGIGVKTALSFQKYQIDELGKEIRPCRLKKRPPVR

SEQ ID NO: 342 - protein, 1081 aa, Neisseria meningitidis 93003
MAAFKPNPINYILGLDIGIASVGWAMVEIDEEENPIRLIDLGVRVFERAEVPKTGDSLAMARRLARSVRRLTRRRAHRLLRARRLLKREGVLQAADFDENGLIKSLPNTPWQLRAAALDRKLTPLEWSAVLLHLIKHRGYLSQRKNEGETADKELGALLKGVADNAHALQTGDFRTPAELALNKFEKESGHIRNQRGDYSHTFSRKDLQAELILLFEKQKEFGNPHVSGGLKEGIETLLMTQRPALSGDAVQKMLGHCTFEPAEPKAAKNTYTAERFIWLTKLNNLRILEQGSERPLTDTERATLMDEPYRKSKLTYAQARKLLGLEDTAFFKGLRYGKDNAEASTLMEMKAYHAISRALEKEGLKDKKSPLNLSPELQDEIGTAFSLFKTDEDITGRLKDRVQPEILEALLKHISFDKFVQISLKALRRIVPLMEQGKRYDEACAEIYGDHYGKKNTEEEIYLPPITADEIRNPVVLRALSQARKVINAVVRRYGSPARIHIETAREVGKSFKDRKEIEKRQEENRKDREKAAAKFREYFPNFVGEPKSKDILKLRLYEQQHGKCLYSGKEINLVRLNEKGYVEIDHALPFSRTWDDSFNNKVLVLGSENQNKGNQTPYEYFNGKENSREWQEFKARVETSRFPRSKKQRILLQKFDEDGFKERNLNDTRYVNRFLCQFVADRMRLTGKGKKRVFASNGQITNLLRGFWGLHKVRAENDRHHALDAVVVACSTIAMQQKITRFVRYKEMNAFDGKTIDKETGEVLHQKAHFPQPWEFFAQEVMIRVFGKPDGKPEFEEADTPEKLRTLLAEKLSSRPEAVHEYVTPLFVSRAPNRKMSGQGHMETVKSAKRLDEGISVLRVPLTQLKLKDLEKMVNRAREPKLYEALKARLEAHKDDPAKAFAEPFYKYDKAGNRTQQVKAVRVEQVQKTGVWVRNHNGIADNATMVRVDVFEKAGKYYLVPIYSWQVAKGILPDRAVVAYADEEDWTVIDESFRFKFVLYSNDLIKVQLKKDSFLGYFSGLDRATGAISLREHDLEKSKGKDGMHRIGVKTALSFQKYQIDEMGKEIRPCRLKKRPPVR

SEQ ID NO: 343 - protein, 1081 aa, Neisseria meningitidis 93004
MAAFKPNPINYILGLDIGIASVGWAMVEIDEDENPICLIDLGVRVFERAEVPKTGDSLAMARRLARSVRRLTRRRAHRLLRARRLLKREGVLQAADFDENGLIKSLPNTPWQLRAAALDRKLTPLEWSAVLLHLIKHRGYLSQRKNEGETADKELGALLKGVADNAHALQTGDFRTPAKLALNKFEKESGHIRNQRGDYSHTFSRKDLQAELNLLFEKQKEFGNPHISDGLKEGIETLLMTQRPALSGDAVQKMLGHCTFEPTEPKAAKNTYTAERFVWLTKLNNLRILEQGSEQPLTDTQRAKLMDEPYRKSKLTYAQARKLLGLEDTAFFKGLRYGKDNAEASTLMEMKAYHAISRALEKEGLKDKKSPLNLSPELQDEIGTAFSLFKTDEDITGRLKDRVQPEILEALLKHISFDKFVQISLKALRRIVPLMEQGKRYNEACAEIYGDHYGKKNTEEKIYLPPIPADEIRNPVVLRALSQARKVINGVVRRYGSPARIHIETAREVGKSFKDRKEIEKRQEENRKDREKAAAKFQEYFPNFVGEPKSKDILKLRLYEQQHGKCLYSGKEINLGRLNEKGYVEIDHALPFSRTWDDSFNNKVLVLGSENQNKGNQTPYEYFNGKDNSREWQEFKARVETSRFPRSKKQRILLQKFDEDGFKERNLNDTRYVNRFLCQFVADRMRLTGKGKKRVFASNGQITNLLRGFWGLRKVRAENDRHHALDAVVVACSTVAMQQKITRFVRYKEMNAFDGKTIDKETGEVLHQKTHFPQPWEFFAQEVMIRVFGKPDGKPEFEEADTPEKLRTLLAEKLSSRPEAVHEYVTPLFVSRAPNRKMSGQGHMETVKSAKRLDEGVSVLRVPLTQLKLKDLEKMVNREREPKLYEALKARLEAHKDDPAKAFAEPFYKYDKAGNRTQQVKAVRVEQVQKTGVWVRNHNGIADNATMVRVDVFEKGDKYYLVPIYSWQVAKGILPDRAVVAYADEEDWTVIDESFRFKFVLYSNDLIKVQLKKDSFLGYFSGLDRATGAISLREHDLEKSKGKDGMHRIGVKTALSFQKYQIDEMGKEIRPCRLKKRPPVR

SEQ ID NO: 344 - protein, 1082 aa, Neisseria meningitidis 96023
MAAFKPNPINYILGLDIGIASVGWAMVEIDEDENPICLIDLGVRVFERAEVPKTGDSLAMARRLARSVRRLTRRRAHRLLRARRLLKREGVLQAADFDENGLIKSLPNTPWQLRAAALDRKLTPLEWSAVLLHLIKHRGYLSQRKNEGETADKELGALLKGVADNAHALQTGDFRTPAELALNKFEKESGHIRNQRGDYSHTFSRKDLQAELILLFEKQKEFGNPHVSGGLKEGIETLLMTQRPALSSDAVQKMLGHCTFEPAEPKAAKNTYTAERFIWLTKLNNLRILEQGSERPLTDTERATLMDEPYRKSKLTYAQARKLLGLEDTAFFKGLRYGKDNAEASTLMEMKAYHAISRALEKEGLKDKKSPLNLSPELQDEIGTAFSLFKTDEDITGRLKDRIQPEILEALLKHISFDKFVQISLKALRRIVPLMEQGKRYDEACAEIYGDHYGKKNTEEKIYLPPIPADEIRNPVVLRALSQARKVINGVVRRYGSPARIHIETAREVGKSFKDRKEIEKRQEENRKDREKAAAKFREYFPNFVGEPKSKDILKLRLYEQQHGKCLYSGKEINLGRLNEKGYVEIDHALPFSRTWDDSFNNKVLVLGSENQNKGNQTPYEYFNGKDNSREWQEFKARVETSRFPRSKKQRILLQKFDEDGFKERNLNDTRYVNRFLYQFVADRMRLTGKGKKRVFASNGQITNLLRGFWGLRKVRAENDRHHALDAVVVACSTVAMQQKITRFVRYKEMNAFDGKTIDKETGEVLHQKTHFPQPWEFFAQEVMIRVFGKPDGKPEFEEADTPEKLRTLLAEKLSSRPEAVHEYVTPLFVSRAPNRKMSGQGHMETVKSAKRLDEGVSVLRVPLTQLKLKDLEKMVNREREPKLYEALKARLEAHKDDPAKAFAEPFYKYDKAGNRTQQVKAVRVEQVQKTGVWVRNHNGIADNATMVRVDVFEKGDKYYLVPIYSWQVAKGILPDRAVVQGKDEEDWQLIDDSFNFKFSLHPNDLVEVITKKARMFGYFASCHRGTGNINIRIHDLDHKIGKNGILEGIGVKTALSFQKYQIDELGKEIRPCRLKKRPPVR

SEQ ID NO: 345 - protein, 1081 aa, Neisseria meningitidis 98008
MAAFKPNPINYILGLDIGIASVGWAMVEIDEDENPICLIDLGVRVFERAEVPKTGDSLAAARRLARSVRRLTRRRAHRLLRARRLLKREGVLQAADFDENGLIKSLPNTPWQLRSAALDRKLTPLEWSAVLLHLIKHRGYLSQRKNEGETADKELGALLKGVANNAHALQTGDFRTPAELALNKFEKESGHIRNQRGDYSHTFSRKDLQAELILLFEKQKEFGNPHVSGGLKEGIETLLMTQRPALSGDAVQKMLGHCTFEPAEPKAAKNTYTAERFIWLTKLNNLRILEQGSERPLTDTERATLMDEPYRKSKLTYAQARKLLGLEDTAFFKGLRYGKDNAEASTLMEMKAYHAISRALEKEGLKDKKSPLNLSPELQDEIGTAFSLFKTDEDITGRLKDRIQPEILEALLKHISFDKFVQISLKALRRIVPLMEQGKRYDEACAEIYGDHYGKKNTEEKIYLPPIPADEIRNPVVLRALSQARKVINGVVRRYGSPARIHIETAREVGKSFKDRKEIEKRQEENRKDREKAAAKFREYFPNFVGEPKSKDILKLRLYEQQHGKCLYSGKEINLGRLNEKGYVEIDHALPFSRTWDDSFNNKVLVLGSENQNKGNQTPYEYFNGKDNSREWQEFKARVETSRFPRSKKQRILLQKFDEDGFKERNLNDTRYVNRFLCQFVADRMRLTGKGKKRVFASNGQITNLLRGFWGLRKVRAENDRHHALDAVVVACSTVAMQQKITRFVRYKEMNAFDGKTIDKETGEVLHQKTHFPQPWEFFAQEVMIRVFGKPDGKPEFEEADTPEKLRTLLAEKLSSRPEAVHEYVTPLFVSRAPNRKMSGQGHMETVKSAKRLDEGVSVLRVPLTQLKLKDLEKMVNREREPKLYEALKARLEAHKDDPAKAFAEPFYKYDKAGNRTQQVKAVRVEQVQKTGVWVRNHNGIADNATMVRVDVFEKAGKYYLVPIYSWQVAKGILPDRAVVAYADEEGWTVIDESFRFKFVLYSNDLIKVQLKKDSFLGYFSGLDRATGAISLREHDLEKSKGKDGMHRIGVKTALSFQKYQIDEMGKEIRLCRLKKRPPVR

SEQ ID NO: 346 - protein, 1082 aa, Neisseria meningitidis
MAAFKPNPINYILGLDIGIASVGWAMVEIDEEENPIRLIDLGVRVFERAEVPKTGDSLAMVRRLARSVRRLTRRRAHRLLRARRLLKREGVLQAADFDENGLIKSLPNTPWQLRAAALDRKLTPLEWSAVLLHLIKHRGYLSQRKNEGETADKELGALLKGVADNAHALQTGDFRTPAELALNKFEKESGHIRNQRGDYSHTFSRKDLQAELILLFEKQKEFGNPHISGGLKEGIETLLMTQRPALSGDAVQKMLGHCTFEPAEPKAAKNTYTAERFIWLTKLNNLRILEQGSERPLTDTERATLMDEPYRKSKLTYAQARKLLGLEDTAFFKGLRYGKDNAEASTLMEMKAYHAISRALEKEGLKDKKSPLNLSPELQDEIGTAFSLFKTDEDITGRLKDRIQPEILEALLKHISFDKFVQISLKALRRIVPLMEQGKRYDEACAEIYGDHYGKKNTEEKIYLPPIPADEIRNPVVLRALSQARKVINGVVRRYGSPARIHIETAREVGKSFKDRKEIEKRQEENRKDREKAAAKFREYFPNFVGEPKSKDILKLRLYEQQHGKCLYSGKEINLGRLNEKGYVEIDHALPFSRTWDDSFNNKVLVLGSENQNKGNQTPYEYFNGKDNSREWQEFKARVETSRFPRSKKQRILLQKFDEDGFKERNLNDTRYVNRFLCQFVADRMRLTGKGKKRVFASNGQITNLLRGFWGLRKVRAENDRHHALDAVVVACSTVAMQQKITRFVRYKEMNAFDGKTIDKETGEVLHQKTHFPQPWEFFAQEVMIRVFGKPDGKPEFEEADTPEKLRTLLAEKLSSRPEAVHEYVTPLFVSRAPNRKMSGQGHMETVKSAKRLDEGVSVLRVPLTQLKLKDLEKMVNREREPKLYEALKARLEAHKDDPAKAFAEPFYKYDKAGNRTQQVKAVRVEQVQKTGVWVRNHNGIADNATMVRVDVFEKGDKYYLVPIYSWQVAKGILPDRAVVQGKDEEDWQLIDDSFNFKFSLHPNDLVEVITKKARMFGYFASCHRGTGNINIRIHDLDHKIGKNGILEGIGVKTALSFQKYQIDELGKEIRPCRLKKRPPVR

SEQ ID NO: 347 - protein, 1082 aa, Neisseria meningitidis alpha275
MAAFKPNPINYILGLDIGIASVGWAMVEIDEDENPICLIDLGVRVFERAEVPKTGDSLAAARRLARSVRRLTRRRAHRLLRARRLLKREGVLQAADFDENGLIKSLPNTPWQLRAAALDRKLTPLEWSAVLLHLIKHRGYLSQRKNEGETADKELGALLKGVADNAHALQTGDFRTPAELALNKFEKESGHIRNQRGDYSHTFSRKDLQAELILLFEKQKEFGNPHVSGGLKEGIETLLMTQRPALSGDAVQKMLGHCTFEPAEPKAAKNTYTAERFIWLTKLNNLRILEQGSERPLTDTERATLMDEPYRKSKLTYAQARKLLGLEDTAFFKGLRYGKDNAEASTLMEMKAYHAISRALEKEGLKDKKSPLNLSPELQDEIGTAFSLFKTDEDITGRLKDRVQPEILEALLKHISFDKFVQISLKALRRIVPLMEQGKRYDEACAEIYGDHYGKKNTEEKIYLPPIPADEIRNPVVLRALSQARKVINGVVRRYGSPARIHIETAREVGKSFKDRKEIEKRQEENRKDREKAAAKFREYFPNFVGEPKSKDILKLRLYEQQHGKCLYSGKEINLGRLNEKGYVEIDHALPFSRTWDDSFNNKVLVLGSENQNKGNQTPYEYFNGKDNSREWQEFKARVETSRFPRSKKQRILLQKFDEDGFKERNLNDTRYVNRFLCQFVADRMRLTGKGKKRVFASNGQITNLLRGFWGLRKVRAENDRHHALDAVVVACSTVAMQQKITRFVRYKEMNAFDGKTIDKETGEVLHQKTHFPQPWEFFAQEVMIRVFGKPDGKPEFEEADTPEKLRTLLAEKLSSRPEAVHEYVTPLFVSRAPNRKMSGQGHMETVKSAKRLDEGVSVLRVPLTQLKLKDLEKMVNREREPKLYEALKARLEAHKDDPAKAFAEPFYKYDKAGNRTQQVKAVRVEQVQKTGVWVRNHNGIADNATMVRVDVFEKGDKYYLVPIYSWQVAKGILPDRAVVQGKDEEDWQLIDDSFNFKFSLHPNDLVEVITKKARMFGYFASCHRGTGNINIRIHDLDHKIGKNGILEGIGVKTALSFQKYQIDELGKEIRPCRLKKRPPVR

SEQ ID NO: 348 - protein, 1082 aa, Neisseria meningitidis ATCC 13091
MAAFKPNPINYILGLDIGIASVGWAMVEIDEEENPIRLIDLGVRVFERAEVPKTGDSLAMARRLARSVRRLTRRRAHRLLRTRRLLKREGVLQAANFDENGLIKSLPNTLWQLRAAALDRKLTPLEWSAVLLHLIKHRGYLSQRKNEGETADKELGALLKGVAGNAHALQTGDFRTPAELALNKFEKESGHIRNQRGDYSHTFSRKDLQAELNLLFEKQKEFGNPHISDGLKEGIETLLMTQRPALSGDAVQKMLGHCTFEPTEPKAAKNTYTTERFIWLTKLNNLRILEQGSERPLTDTERATLMDEPYRKSKLTYAQARKLLELDDIAFFKGLRYGKDNAEASTLMEMKAYHAISRALEKEGLKDKKSPLNLSPELQDEIGTAFSLFKTDEDITGRLKDRIQPEILEALLKHINFDKFVQISLKALRRIVPLMEQGKRYDEACAEIYGDHYGKKNTEEKIDLPPIPADEIHNPVVLRALSQARKVINGVVRRYGSPARIHIETAREVGKSFKDRKEIEKRQEENRKDREKAAAKFREYFPNFVGEPKSKDILKLRLYEQQHGKCLYSGKEINLGRLNEKGYVEIDHALPFSRTWDDSFNNKVLVLGSENQNKGNQTPYEYFNGKDNSREWQEFKARVETSRFPRSKKQRILLQKFDEDGFKERNLNDTRYVNRFLCQFVADRMRLTGKGKKRVFASNGQITNLLRGFWGLRKVRAENDRHHALDAVVVACSTVAMQQKITRFVRYKEMNAFDGKTIDKETGEVLHQKTHFPQPWEFFAQEVMIRVFGKPDGKPEFEEADTPEKLRTLLTEKLSSRPEAVHEYVTPLFVSRAPNRKMSGQGHMETVKSAKRLDEGISVLRVPLTQLKLKDLEKMVNREREPKLYEALKARLEAHKDDPAKAFAEPFYKYDKAGNRTQQVKAMRVEQVQKTGVWVRNHNGIADNATMVRVDVFEKGDKYYLVPIYSWQVAKGILPDRAVVQGKDEEDWQLIDDSFNFKFSLHPNDLVEVITKKARMFGYFASCHRGTGNINIRIHDLDHKIGKNGILEGIGVKTALSFQKYQIDELGKEIRPCRLKKRPPVR

SEQ ID NO: 349 - protein, 1081 aa, Neisseria meningitidis N1568
MAAFKPNPINYILGLDIGIASVGWAMVEIDEEENPIRLIDLGVRVFERAEVPKTGDSLAMARRLARSVRRLTRRRAHRLLRARRLLKREGVLQAADFDENGLIKSLPNTPWQLRAAALDRKLTPLEWSAVLLHLIKHRGYLSQRKNEGETADKELGALLKGVADNAHALQTGDFRTPAELALNKFEKECGHIRNQRGDYSHTFSRKDLQAELNLLFEKQKEFGNPHVSGGLKEGIETLLMTQRPALSGDAVQKMLGHCTFEPAEPKAAKNTYTAERFIWLTKLNNLRILEQGSERPLTDTERATLMDEPYRKSKLTYAQARKLLSLEDTAFFKGLRYGKDNAEASTLMEMKAYHTISRALEKEGLKDKKSPLNLSPELQDEIGTAFSLFKTDEDITGRLKDRIQPEILEALLKHISFDKFVQISLKALRRIVPLMEQGKRYDEACAEIYGDHYGKKNTEEKIYLPPIPADEIRNPVVLRALSQARKVINGVVRRYGSPARIHIETAREVGKSFKDRKEIEKRQEENRKDREKAAAKFREYFPNFVGEPKSKDILKLRLYEQQHGKCLYSGKEINLGRLNEKGYVEIDHALPFSRTWDDSFNNKVLVLGSENQNKGNQTPYEYFNGKDNSREWQEFKARVETSRFPRSKKQRILLQKFDEDGFKERNLNDTRYVNRFLCQFVADRMRLTGKGKKRVFASNGQITNLLRGFWGLRKVRAENDRHHALDAVVVACSTVAMQQKITRFVRYKEMNAFDGKTIDKETGEVLHQKTHFPQPWEFFAQEVMIRVFGKPDGKPEFEEADTPEKLRTLLAEKLSSRPEAVHEYVTPLFVSRAPNRKMSGQGHMETVKSAKRLDEGVSVLRVPLTQLKLKDLEKMVNREREPKLYEALKARLEAHKDDPAKAFAEPFYKYDKAGNRTQQVKAVRVEQVQKTGVWVRNHNGIADNATMVRVDVFEKGDKYYLVPIYSWQVAKGILPDRAVVAYADEEDWTVIDESFRFKFVLYSNDLIKVQLKKDSFLGYFSGLDRATGAISLREHDLEKSKGKDGMHRIGVKTALSFQKYQIDEMGKEIRPCRLKKRPPVR

SEQ ID NO: 350 - protein, 1081 aa, Neisseria meningitidis NM140
MAAFKPNPINYILGLDIGIASVGWAMVEIDEDENPICLIDLGVRVFERAEVPKTGDSLAAARRLARSVRRLTRRRAHRLLRARRLLKREGVLQAADFDENGLIKSLPNTPWQLRSAALDRKLTPLEWSAVLLHLIKHRGYLSQRKNEGETADKELGALLKGVADNAHALQTGDFRTPAELALNKFEKESGHIRNRRGDYSHTFSRKDLQAELDLLFEKQKEFGNPHISDDLKEGIETLLMTQRPALSGDAVQKMLGHCTFEPTEPKAAKNTYTAERFVWLTKLNNLRILEQGSERPLTDTERATLMDEPYRKSKLTYAQARKLLELDDTAFFKGLRYGKDNAEASTLMEMKAYHAISRALEKEGLKDKKSPLNLSPELQDEIGTAFSLFKTDEDITGRLKDRVQPEILEVLLKHISFDKFVQISLKALRRIVPLMEQGKRYDEACAEIYGDHDGKKNTEEKIYLPPIPADEIRNPVVLRALSQARKVINAVVRRYGSPARIHIETAREVGKSFKDRKEIEKRQEENRKDREKAAAKFREYFPNFVGEPKSKDILKLRLYEQQHGKCLYSGKEINLGRLNEKGYVEIDHALPFSRTWDDSFNNKVLVLGSENQNKGNQTPYEYFNGKDNSREWQEFKARVETSRFPRSKKQRILLQKFDEEGFKERNLNDTRYVNRFLCQFVADHMLLTGKGKRRVFASNGQITNLLRGFWGLRKVRAENNRHHALDAVVVACSTVAMQQKITRFVRYKEMNAFDGKTIDKETGEVLHQKTHFPQPWEFFAQEVMIRVFGKPDGKPEFEEADTPEKLRTLLAEKLSSRPEAVHEYVTPLFVSRAPNRKMSGQGHMETVKSAKRLDEGVSVLRVPLTQLKLKDLEKMVNREREPKLYEALKARLEAHKDDPAKAFAEPFYKYDKAGNRTQQVKAVRVEQVQKTGVWVRNHNGIADNATMVRVDVFEKAGKYYLVPIYSWQVAKGILPDRAVVAYADEEGWTVIDESFRFKFVLYSNDLIKVQLKKDSFLGYFSGLDRATGAISLREHDLEKSKGKDGMHRIGVKTALSFQKYQIDEMGKEIRLCRLKKRPPVR

SEQ ID NO: 351 - protein, 1082 aa, Neisseria meningitidis NM220
MAAFKPNPINYILGLDIGIASVGWAMVEIDEEENPIRLIDLGVRVFERAEVPKTGDSLAMARRLARSVRRLTRRRAHRLLRARRLLKREGVLQAADFDENGLIKSLPNTPWQLRAAALDRKLTPLEWSAVLLHLIKHRGYLSQRKNEGETADKELGALLKGVANNAHALQTGDFRTPAELALNKFEKESGHIRNQRGDYSHTFSRKDLQAELILLFEKQKEFGNPHVSGGLKEGIETLLMTQRPALSGDAVQKMLGHCTFEPAEPKAAKNTYTAERFIWLTKLNNLRILEQGSERPLTDTERATLMDEPYRKSKLTYAQARKLLGLEDTAFFKGLRYGKDNAEASTLMEMKAYHAISRALEKEGLKDKKSPLNLSSELQDEIGTAFSLFKTDEDITGRLKDRVQPEILEALLKHISFDKFVQISLKALRRIVPLMEQGKRYDEACAEIYGDHYGKKNTEEKIYLPPIPADEIRNPVVLRALSQARKVINGVVRRYGSPARIHIETAREVGKSFKDRKEIEKRQEENRKDREKAAAKFREYFPNFVGEPKSKDILKLRLYEQQHGKCLYSGKEINLVRLNEKGYVEIDHALPFSRTWDDSFNNKVLVLGSENQNKGNQTPYEYFNGKDNSREWQEFKARVETSRFPRSKKQRILLQKFDEDGFKECNLNDTRYVNRFLCQFVADHILLTGKGKRRVFASNGQITNLLRGFWGLRKVRAENDRHHALDAVVVACSTVAMQQKITRFVRYKEMNAFDGKTIDKETGKVLHQKTHFPQPWEFFAQEVMIRVFGKPDGKPEFEEADTPEKLRTLLAEKLSSRPEAVHEYVTPLFVSRAPNRKMSGAHKDTLRSAKRFVKHNEKISVKRVWLTEIKLADLENMVNYKNGREIELYEALKARLEAYGGNAKQAFDPKDNPFYKKGGQLVKAVRVEKTQESGVLLNKKNAYTIADNGDMVRVDVFCKVDKKGKNQYFIVPIYAWQVAENILPDIDCKGYRIDDSYTFCFSLHKYDLIAFQKDEKSKVEFAYYINCDSSNGRFYLAWHDKGSKEQQFRISTQNLVLIQKYQVNELGKEIRPCRLKKRPPVR

SEQ ID NO: 352 - protein, 1082 aa, Neisseria meningitidis NM233
MAAFKPNPINYILGLDIGIASVGWAMVEIDEEENPIRLIDLGVRVFERAEVPKTGDSLAMARRLARSVRRLTRRRAHRLLRARRLLKREGVLQAADFDENGLIKSLPNTPWQLRAAALDRKLTPLEWSAVLLHLIKHRGYLSQRKNEGETADKELGALLKGVANNAHALQTGDFRTPAELALNKFEKESGHIRNQRGDYSHTFSRKDLQAELILLFEKQKEFGNPHVSGGLKEGIETLLMTQRPALSGDAVQKMLGHCTFEPAEPKAAKNTYTAERFIWLTKLNNLRILEQGSERPLTDTERATLMDEPYRKSKLTYAQARKLLGLEDTAFFKGLRYGKDNAEASTLMEMKAYHAISRALEKEGLKDKKSPLNLSSELQDEIGTAFSLFKTDEDITGRLKDRVQPEILEALLKHISFDKFVQISLKALRRIVPLMEQGKRYDEACAEIYGDHYGKKNTEEKIYLPPIPADKIRNPVVLRALSQARKVINGVVRRYGSPARIHIETAREVGKSFKDRKEIEKRQEENRKDREKAAAKFREYFPNFVGEPKSKDILKLRLYEQQHGKCLYSGKEINLVRLNEKGYVEIDHALPFSRTWDDSFNNKVLVLGSENQNKGNQTPYEYFNGKDNSREWQEFKARVETSRFPRSKKQRILLQKFDEDGFKECNLNDTRYVNRFLCQFVADHILLTGKGKRRVFASNGQITNLLRGFWGLRKVRAENDRHHALDAVVVACSTVAMQQKITRFVRYKEMNAFDGKTIDKETGKVLHQKTHFPQPWEFFAQEVMIRVFGKPDGKPEFEEADTPEKLRTLLAEKLSSRPEAVHEYVTPLFVSRAPNRKMSGAHKDTLRSAKRFVKHNEKISVKRVWLTEIKLADLENMVNYKNGREIELYEALKARLEAYGGNAKQAFDPKDNPFYKKGGQLVKAVRVEKTQESGVLLNKKNAYTIADNGDMVRVDVFCKVDKKGKNQYFIVPIYAWQVAENILPDIDCKGYRIDDSYTFCFSLHKYDLIAFQKDEKSKVEFAYYINCDSSNGRFYLAWHDKGSKEQQFRISTQNLVLIQKYQVNELGKEIRPCRLKKRPPVR

SEQ ID NO: 353 - protein, 1082 aa, Neisseria meningitidis
MAAFKPNPINYILGLDIGIASVGWAMVEIDEDENPICLIDLGVRVFERAEVPKTGDSLAMARRLARSVRRLTRRRAHRLLRARRLLKREGVLQAADFDENGLIKSLPNTPWQLRAAALDRKLTPLEWSAVLLHLIKHRGYLSQRKNEGETADKELGALLKGVADNAHALQTGDFRTPAELALNKFEKESGHIRNQRGDYSHTFSRKDLQAELILLFEKQKEFGNPHVSGGLKEGIETLLMTQRPALSSDAVQKMLGHCTFEPAEPKAAKNTYTAERFIWLTKLNNLRILEQGSERPLTDTERATLMDEPYRKSKLTYAQARKLLGLEDTAFFKGLRYGKDNAEASTLMEMKAYHAISRALEKEGLKDKKSPLNLSPELQDEIGTAFSLFKTDEDITGRLKDRIQPEILEALLKHISFDKFVQISLKALRRIVPLMEQGKRYDEACAEIYGDHYGKKNTEEKIYLPPIPADEIRNPVVLRALSQARKVINGVVRRYGSPARIHIETAREVGKSFKDRKEIEKRQEENRKDREKAAAKFREYFPNFVGEPKSKDILKLRLYEQQHGKCLYSGKEINLGRLNEKGYVEIDHALPFSRTWDDSFNNKVLVLGSENQNKGNQTPYEYFNGKDNSREWQEFKARVETSRFPRSKKQRILLQKFDEDGFKERNLNDTRYVNRFLCQFVADRMRLTGKGKKRVFASNGQITNLLRGFWGLRKVRAENDRHHALDAVVVACSTVAMQQKITRFVRYKEMNAFDGKTIDKETGEVLHQKTHFPQPWEFFAQEVMIRVFGKPDGKPEFEEADTPEKLRTLLAEKLSSRPEAVHEYVTPLFVSRAPNRKMSGQGHMETVKSAKRLDEGVSVLRVPLTQLKLKDLEKMVNREREPKLYEALKARLEAHKDDPAKAFAEPFYKYDKAGNRTQQVKAVRVEQVQKTGVWVRNHNGIADNATMVRVDVFEKGDKYYLVPIYSWQVAKGILPDRAVVQGKDEEDWQLIDDSFNFKFSLHPNDLVEVITKKARMFGYFASCHRGTGNINIRIHDLDHKIGKNGILEGIGVKTALSFQKYQIDELGKEIRPCRLKKRPPVR

SEQ ID NO: 354 - protein, 1082 aa, Neisseria meningitidis
MAAFKPNPINYILGLDIGIASVGWAMVEIDEDENPICLIDLGVRVFERAEVPKTGDSLAMARRLARSVRRLTRRRAHRLLRARRLLKREGVLQAADFDENGLIKSLPNTPWQLRAAALDRKLTPLEWSAVLLHLIKHRGYLSQRKNEGETADKELGALLKGVADNAHALQTGDFRTPAELALNKFEKESGHIRNQRGDYSHTFSRKDLQAELILLFEKQKEFGNPHVSGGLKEGIETLLMTQRPALSGDAVQKMLGHCTFEPAEPKAAKNTYTAERFIWLTKLNNLRILEQGSERPLTDTERATLMDEPYRKSKLTYAQARKLLGLEDTAFFKGLRYGKDNAEASTLMEMKAYHAISRALEKEGLKDKKSPLNLSPELQDEIGTAFSLFKTDEDITGRLKDRIQPEILEALLKHISFDKFVQISLKALRRIVPLMEQGKRYDEACAEIYGDHYGKKNTEEKIYLPPIPADEIRNPVVLRALSQARKVINGVVRRYGSPARIHIETAREVGKSFKDRKEIEKRQEENRKDREKAAAKFREYFPNFVGEPKSKDILKLRLYEQQHGKCLYSGKEINLGRLNEKGYVEIDHALPFSRTWDDSFNNKVLVLGSENQNKGNQTPYEYFNGKDNSREWQEFKARVETSRFPRSKKQRILLQKFDEDGFKERNLNDTRYVNRFLCQFVADRMRLTGKGKKRVFASNGQITNLLRGFWGLRKVRAENDRHHALDAVVVACSTVAMQQKITRFVRYKEMNAFDGKTIDKETGEVLHQKTHFPQPWEFFAQEVMIRVFGKPDGKPEFEEADTPEKLRTLLAEKLSSRPEAVHEYVTPLFVSRAPNRKMSGQGHMETVKSAKRLDEGVSVLRVPLTQLKLKDLEKMVNREREPKLYEALKARLEAHKDDPAKAFAEPFYKYDKAGNRTQQVKAVRVEQVQKTGVWVRNHNGIADNATMVRVDVFEKGDKYYLVPIYSWQVAKGILPDRAVVQGKDEEDWQLIDDSFNFKFSLHPNDLVEVITKKARMFGYFASCHRGTGNINIRIHDLDHKIGKNGILEGIGVKTALSFQKYQIDELGKEIRPCRLKKRPPVR

SEQ ID NO: 355 - protein, 1089 aa, Neisseria sp. oral taxon 014 str. F0314
MTAFKPNPLNYILGLDIGIASVGWAMVEIDDKENPVRLIDLGVRVFERAEMPKTGDSLAAARRLARSVRRLTRRRAHRLLRARRLLKHEGVLKPEDFDENGLVKPLPYIPKQPRNTPWQLRAAALDRKLTPLEWAAVLLHLVKHRGYLSQRKNEGETDDKELGALLKGVADNTHALQAGNFRTPAELALNKFEKESGHIRNQRGDYSHTFSRKDLQAELVLLFEKQKEFGNPYVSDDLKNGIENLLMTQRPALSGDAIQKMLGHCTFEPAEPKAAKNTYTAERFIWLTKLNNLRILNQGNERPLTDAERTTLMDEPYKKSKLTYAQARKLLDLDDTAFFKGLRYGKDNAESATLMEMKAYHAISRALEKEGLKDKKSPLSLSPELQDEIGTAFSLFKTDEEITGRLKGCLQPEILDALLKHISFDKFVQISLKALRRIVPLMEQGKRYDEACAEIYGDHHGRRNSEETLYLPPIPADEIRNPVVLRALSQARKVINGVGRRYGSPARIHIETAREVGKSFKDRKEIEKRQEENRKDREKAAAEFQEYFPNFVGEPKSKDILKLRLYRQQNCKCLYSGKEINLGRLNEKGYVEIDHALPFSRTWDDSFNNKVLVLGSENQNKGNRTPYEYLNGKDNSREWQEFKARVETSRFPHSKKQRILLQKFDEEGFKERNLNDTRYVNRFLCKFVADHMQLTGKGKRRVFASNGQITNLLRGFWGLRKVRAENDRHHALDAVVVACSTVAMQQRITRFVRYKEMNAFDGKTVDKETGEVLHQKTHFPQPWEFFAQEVMIRVFGKPDGKPELEEADTPEKLRALLAEKLSSRPEAVHEYVAPLFVSRAPNRKMSGQGHMETIKSPKRLDEGISVVRVPLTQLKLKDLEKMVNREREPKLYEALKARLEAHKDDPAKAFAEPFYKQDKAGNRTQQVKAVRIEQVQKTGVWVRNQNGIADNATMVRVDVFEKGGKYYLVPIYSWQVAKGILPDKAIIAFKDEEEWQLIDDSFNFKFPLHPNDLVEVITKKARIFGYFASCHRGTGNINIRIHDLDNKVGKNGILEGIGVKTALSFQKYQIDELGKEIRPCRLKKRPPVR

SEQ ID NO: 356 - protein, 1097 aa, Neisseria wadsworthii 9715
MKKQPQRYILGLDLGIASVGWALILVDGAENPVGLLDCGVRTFERAEVPKTGDSLALARRQARSVRRLIRRRAHRLLRLRRLLKREGILSAADFNSDGLPNLPIDAWQLRVAGLERKLTNQEWAAVLLHLVKHRGYLSQRKSETQTENKELGRLLAGVAENSKLLSESSEQYRTPAELAVKLFAEQSGHLRNKGGEYTHTFNRLDLQKELHLLFERQYALGNPFASAELQSKVDELLMTQRSALQGEAVLKMLGKCTFEPSEYKAAKNTYSAERFIWLTKLNNLRILYNGEERALDEGDRKKLLDEPYKKAKLTYKQVRSILNLPESAVFKGLRYGKDSDGLKAENGTLMEMKAYHKIRTILDKAGLKGEWENRIRNPEILDKIGTAFSLYKTDEDIQAALADLRLPENVLDALLAGLNFDKFIQLSLKALRNILPLMERGIRYDEACKEVYGDHRALAESKNQVLLPPIPADEIRNPVVLRTLTQARKVINAIIRRYGSPQRVHIETARELGKSKQERDKIDRKNKENQNDRNRLASDIRKHFNFEPTPKDILKLRLYEQQHGKCLYSDLREEKGECLYTGNVIELHRLFEDGYVEIDHALPLSRTWDNSLNNKVLVLKSSNQNKGNKTPYEWLDGANNSRRWREFQARVQGCHFPYVKKQRIQTAKLDSKAEQGFLERNLNDTRYISKFMCQFITANLRLAETSNALMEEVAGENPYWKERKRQRVFAPSGSIIALLRGLWGLKKVREDNDRHHALDAIVVACSTVSMQQKITKAMQRRETLETVDSETGEVKTRIPQPWDFFRQEVMIRVFSDSPREELAEKLNSRPEALHDFVSPLFVSRAPNRKMTGQGHLETVKSAKRLSENISVVRKPLTALKLKDIENIVGYPDREPALYQALRERLLAHKDDPVKAFADKPFYKPAKDGGQGSLVKAVRIIENTKHGLKIRNGITDTNGDMVRTDVYQKTDKKGKRQYFIVPVYAWQVEKNELPTVDCKGYEIDDNYEFCFSLYKYDLIEIQNPNDINQELRAYYINCDSSDGRFWLAYHDKSAKEQQFRISTQNQPIIKKYQVDTLGKEIRLCKAEKRTALNGKKKK

SEQ ID NO: 357 - protein, 1426 aa, Niabella soli DSM 19437
MPRKNILGLDLGTTSIGFAKIIEDDDYQCSSVELIGVRVNPLTTDEQTNFEKGKPVSVNADRTLKRGMRRNLDRYQLRRDYLIEILRTHHIITADTKLAEDGKNTTHTTYALRALAATAEIPLEAFVRVLLAINKKRGYKSSRKAKNEDEGQLIDGMAIARRLYEESLTPGQFSYQLLKEGKKYLPDFYRSDLNTELNKVWNFQKQFYPEILTDEFKRHLEGKGQRATAVAFWGQHGFSMAENKGSREEKKLHAYKWRSEAAHKQLTKEEVAFVITEINNDLNKSSGYLGAISDRSKELFFNKQTVGQYLHQQLKENPHTRLKGQVFYRQDYLDEFETIWEMQAKFYSALTLELKEEVRDVVIFYQRKLKSQMGLISLCEFESKEIEIEKNGEKAKKRIGLRVAPKSSPLFQEFKIWQVLNNLEFRNKKTKEVFVPEMAAKQQLFDELNIKGNLLASEAIKILGYKTKDWEANYHTLEGNRTNKSLYDAWLKILELEGYDENLLKLSGSDDIDVSKIEKPALEIRQMVLAVFEVLGISGAILDFDAEADGKAFEQQPAYQLWHLLYSAEDDGKKYSQEDIFTYGHDNIGLKKKLCEKFGFRPEHTKILVNVVFSDDYGNLSSKAMRRIYPFIKELTYDKACAEAGYRHSAASLTKEEIAARPLQNRLDLLKKNELRSPVVEKILNQMVNVVNTLVDDENQNRKARGLSEDFHFDEIRIELARELKKNAKERAEMTTNINTAKQSHEKIIRILQTEFGVPNPSRNDIVRYKLYEELKNNGYKDLYTNTYISRDILFSKQIDVDHIIPQMSLFDDSFSNKTVVFRKDNQDKGNKTAYDYILGKYGEQALEEYISRITSLFELGKKNKEEGIGKAKFQKLQKRLVDIGDGFIERDLRESQYIAKKANNMLYAICRSVVSTSGEITARLREDWDLVNVMQEINLPKFRALGLTEMVEKKDGAQKERITDWTKRNDHRHHAMDALAIAFTRHSHIQYLNHLNARKDEANKWHPVVSKIEEKETVLIYDDLGNRKRKFKAPMPNFREVVKEHLENVLISHKAKNKVVTKNKNKIKTVRGEKVKTELTPRGQLHKETIYGRYRYYESKEEKIGPKFDAEMIGMVTNPQYKKLLLERLAANGNDPKKAFWGKNALNKNPLYVDEARQELLPEKILLRWLNDDYSIRKDVTPENLKDIKTIEKILDKGVKKILLKRLADFGNDPKKAFSDLDKNPIWQNEAKRIAIKRVTISGIKNAAPLHHKKDHLGNDILDEKGKQIPSSFVSTGNNHHVAIYRDAEGNLQERVVSLFDAVQLVNGGEPVIDKEYNKGIGWQFLFTMKQNEMFVFPDEKTGFNPREVDLLSSGNRKLISPNLFRVQKLASKNYFFRHHLETSVEEKKELKNIAYKPQLGLNALSNIVKVRINHIGEIVSVGEY

SEQ ID NO: 358 - protein, 1132 aa, Nitratifractor salsuginis
MKKILGVDLGITSFGYAILQETGKDLYRCLDNSVVMRNNPYDEKSGESSQSIRSTQKSMRRLIEKRKKRIRCVAQTMERYGILDYSETMKINDPKNNPIKNRWQLRAVDAWKRPLSPQELFAIFAHMAKHRGYKSIATEDLIYELELELGLNDPEKESEKKADERRQVYNALRHLEELRKKYGGETIAQTIHRAVEAGDLRSYRNHDDYEKMIRREDIEEEIEKVLLRQAELGALGLPEEQVSELIDELKACITDQEMPTIDESLFGKCTFYKDELAAPAYSYLYDLYRLYKKLADLNIDGYEVTQEDREKVIEWVEKKIAQGKNLKKITHKDLRKILGLAPEQKIFGVEDERIVKGKKEPRTFVPFFFLADIAKFKELFASIQKHPDALQIFRELAEILQRSKTPQEALDRLRALMAGKGIDTDDRELLELFKNKRSGTRELSHRYILEALPLFLEGYDEKEVQRILGFDDREDYSRYPKSLRHLHLREGNLFEKEENPINNHAVKSLASWALGLIADLSWRYGPFDEIILETTRDALPEKIRKEIDKAMREREKALDKIIGKYKKEFPSIDKRLARKIQLWERQKGLDLYSGKVINLSQLLDGSADIEHIVPQSLGGLSTDYNTIVTLKSVNAAKGNRLPGDWLAGNPDYRERIGMLSEKGLIDWKKRKNLLAQSLDEIYTENTHSKGIRATSYLEALVAQVLKRYYPFPDPELRKNGIGVRMIPGKVTSKTRSLLGIKSKSRETNFHHAEDALILSTLTRGWQNRLHRMLRDNYGKSEAELKELWKKYMPHIEGLTLADYIDEAFRRFMSKGEESLFYRDMFDTIRSISYWVDKKPLSASSHKETVYSSRHEVPTLRKNILEAFDSLNVIKDRHKLTTEEFMKRYDKEIRQKLWLHRIGNTNDESYRAVEERATQIAQILTRYQLMDAQNDKEIDEKFQQALKELITSPIEVTGKLLRKMRFVYDKLNAMQIDRGLVETDKNMLGIHISKGPNEKLIFRRMDVNNAHELQKERSGILCYLNEMLFIFNKKGLIHYGCLRSYLEKGQGSKYIALFNPRFPANPKAQPSKFTSDSKIKQVGIGSATGIIKAHLDLDGHVRSYEVFGTLPEGSIEWFKEESGYGRVEDDPHH

SEQ ID NO: 359 - protein, 1166 aa, Nitrobacter hamburgensis
MHVEIDFPHFSRGDSHLAMNKNEILRGSSVLYRLGLDLGSNSLGWFVTHLEKRGDRHEPVALGPGGVRIFPDGRDPQSGTSNAVDRRMARGARKRRDRFVERRKELIAALIKYNLLPDDARERRALEVLDPYALRKTALTDTLPAHHVGRALFHLNQRRGFQSNRKTDSKQSEDGAIKQAASRLATDKGNETLGVFFADMHLRKSYEDRQTAIRAELVRLGKDHLTGNARKKIWAKVRKRLFGDEVLPRADAPHGVRARATITGTKASYDYYPTRDMLRDEFNAIWAGQSAHHATITDEARTEIEHIIFYQRPLKPAIVGKCTLDPATRPFKEDPEGYRAPWSHPLAQRFRILSEARNLEIRDTGKGSRRLTKEQSDLVVAALLANREVKFDKLRTLLKLPAEARFNLESDRRAALDGDQTAARLSDKKGFNKAWRGFPPERQIAIVARLEETEDENELIAWLEKECALDGAAAARVANTTLPDGHCRLGLRAIKKIVPIMQDGLDEDGVAGAGYHIAAKRAGYDHAKLPTGEQLGRLPYYGQWLQDAVVGSGDARDQKEKQYGQFPNPTVHIGLGQLRRVVNDLIDKYGPPTEISIEFTRALKLSEQQKAERQREQRRNQDKNKARAEELAKFGRPANPRNLLKMRLWEELAHDPLDRKCVYTGEQISIERLLSDEVDIDHILPVAMTLDDSPANKIICMRYANRHKRKQTPSEAFGSSPTLQGHRYNWDDIAARATGLPRNKRWRFDANAREEFDKRGGFLARQLNETGWLARLAKQYLGAVTDPNQIWVVPGRLTSMLRGKWGLNGLLPSDNYAGVQDKAEEFLASTDDMEFSGVKNRADHRHHAIDGLVTALTDRSLLWKMANAYDEEHEKFVIEPPWPTMRDDLKAALEKMVVSHKPDHGIEGKLHEDSAYGFVKPLDATGLKEEEAGNLVYRKAIESLNENEVDRIRDIQLRTIVRDHVNVEKTKGVALADALRQLQAPSDDYPQFKHGLRHVRILKKEKGDYLVPIANRASGVAYKAYSAGENFCVEVFETAGGKWDGEAVRRFDANKKNAGPKIAHAPQWRDANEGAKLVMRIHKGDLIRLDHEGRARIMVVHRLDAAAGRFKLADHNETGNLDKRHATNNDIDPFRWLMASYNTLKKLAAVPVRVDELGRVWRVMPN

SEQ ID NO: 360 - protein, 1044 aa, Nitrosomonas sp. AL212
MLHKMRYRLALDLGSTSLGWAMVRLNANQQPCAVIKAGVRIFSNGRNPKDGSSLAVTRREARSMRRRRDRLLKRKARMMRTLIEYGFFPANETQRKALENLNPYALRAKGLDEALTPSEFARALFHINQRRGFKSNRKTDKKDSDSGALKTAIKQLHSVLDPQGNDGKPRTVGELLYKRFTDLSKLPKDRTVRARYRQDKIVKDDGKTKIDKYYDLYIDRAMIEQEFDALWKKQSELNPILFTENARADLKDVLLYQRSLKPVKPGRCTFMSEEERAPLALPSTQRFRMYQEVNNLRILREGLKEESLTLQQRDDLINALEKNNRRTFTQIKKLLGVGGSVQFNFEDPKREELKGNTTSAILGKSEHFGEAWFAFNEAKQDAIVLQLIKEENEAKLVRWLQDETGIDEKRAEVIANAGLPEGYGSLCIEALARILPELRRDVVTYDKAVQAAGFEHHSKLNRNEEIPDITFKIESIDRNSGEIKQFHLHKELPYYGEYLQRHVGFGSGKPEDSIEKRYGKIANPTVHIGLNQVRVVVNALIKRYGHPSEIIVEVARDLKQSKDRRDEENKRQAENQKRNERLRKDIADILGISEERVRRDDIEKMILWEELSFDPADRRCPYSGVQVSTVMLLSDEVEVEHILPFSQTLDDSLNNKTVALRQANRIKGNRTPWEAFGTSNISGFDYSGILTRAELMPKAKRYRFAEDGYQRWLKDDAGFLARALNDTRHLSKIAREYMSLICPNTRVIPGQMTAMLRRNFGLNDVLGLNGEKNRNDHRHHAVDACVIAVTDQGLLQRFAAASASARERQLNRLVENMPLPWESYREHVRRAIDGIWVSHRPDHSHEGAMHNDTAYGLRGNGRVSFHKMVEGKREYIEDNLKVIEITDTKAIDRHGLLPTGKPRPYKGYKGDSNYCIEIVRNEKGRWEGEIISTFDAYQLVRKYGIVQLRYPVLSVSGKPLVMRLIRNDFVRLEHEGITRTLRVCKMREDGQVALADVTEANVDARTRTKEICYVFKTGGSLQKAKARRITISPIGELRDPGFKE

SEQ ID NO: 361 - protein, 1498 aa, Odoribacter laneus YIT 12061
METTLGIDLGTNSIGLALVDQEEHQILYSGVRIFPEGINKDTIGLGEKEESRNATRRAKRQMRRQYFRKKLRKAKLLELLIAYDMCPLKPEDVRRWKNWDKQQKSTVRQFPDTPAFREWLKQNPYELRKQAVTEDVTRPELGRILYQMIQRRGFLSSRKGKEEGKIFTGKDRMVGIDETRKNLQKQTLGAYLYDIAPKNGEKYRFRTERVRARYTLRDMYIREFEIIWQRQAGHLGLAHEQATRKKNIFLEGSATNVRNSKLITHLQAKYGRGHVLIEDTRITVTFQLPLKEVLGGKIEIEEEQLKFKSNESVLFWQRPLRSQKSLLSKCVFEGRNFYDPVHQKWIIAGPTPAPLSHPEFEEFRAYQFINNIIYGKNEHLTAIQREAVFELMCTESKDFNFEKIPKHLKLFEKFNFDDTTKVPACTTISQLRKLFPHPVWEEKREEIWHCFYFYDDNTLLFEKLQKDYALQTNDLEKIKKIRLSESYGNVSLKAIRRINPYLKKGYAYSTAVLLGGIRNSFGKRFEYFKEYEPEIEKAVCRILKEKNAEGEVIRKIKDYLVHNRFGFAKNDRAFQKLYHHSQAITTQAQKERLPETGNLRNPIVQQGLNELRRTVNKLLATCREKYGPSFKFDHIHVEMGRELRSSKTEREKQSRQIRENEKKNEAAKVKLAEYGLKAYRDNIQKYLLYKEIEEKGGTVCCPYTGKTLNISHTLGSDNSVQIEHIIPYSISLDDSLANKTLCDATFNREKGELTPYDFYQKDPSPEKWGASSWEEIEDRAFRLLPYAKAQRFIRRKPQESNEFISRQLNDTRYISKKAVEYLSAICSDVKAFPGQLTAELRHLWGLNNILQSAPDITFPLPVSATENHREYYVITNEQNEVIRLFPKQGETPRTEKGELLLTGEVERKVFRCKGMQEFQTDVSDGKYWRRIKLSSSVTWSPLFAPKPISADGQIVLKGRIEKGVFVCNQLKQKLKTGLPDGSYWISLPVISQTFKEGESVNNSKLTSQQVQLFGRVREGIFRCHNYQCPASGADGNFWCTLDTDTAQPAFTPIKNAPPGVGGGQIILTGDVDDKGIFHADDDLHYELPASLPKGKYYGIFTVESCDPTLIPIELSAPKTSKGENLIEGNIWVDEHTGEVRFDPKKNREDQRHHAIDAIVIALSSQSLFQRLSTYNARRENKKRGLDSTEHFPSPWPGFAQDVRQSVVPLLVSYKQNPKTLCKISKTLYKDGKKIHSCGNAVRGQLHKETVYGQRTAPGATEKSYHIRKDIRELKTSKHIGKVVDITIRQMLLKHLQENYHIDITQEFNIPSNAFFKEGVYRIFLPNKHGEPVPIKKIRMKEELGNAERLKDNINQYVNPRNNHHVMIYQDADGNLKEEIVSFWSVIERQNQGQPIYQLPREGRNIVSILQINDTFLIGLKEEEPEVYRNDLSTLSKHLYRVQKLSGMYYTFRHHLASTLNNEREEFRIQSLEAWKRANPVKVQIDEIGRITFLNGPLC

SEQ ID NO: 362 - protein, 1389 aa, Oenococcus kitaharae DSM 17330
MARDYSVGLDIGTSSVGWAAIDNKYHLIRAKSKNLIGVRLFDSAVTAEKRRGYRTTRRRLSRRHWRLRLLNDIFAGPLTDFGDENFLARLKYSWVHPQDQSNQAHFAAGLLFDSKEQDKDFYRKYPTIYHLRLALMNDDQKHDLREVYLAIHHLVKYRGHFLIEGDVKADSAFDVHTFADAIQRYAESNNSDENLLGKIDEKKLSAALTDKHGSKSQRAETAETAFDILDLQSKKQIQAILKSVVGNQANLMAIFGLDSSAISKDEQKNYKFSFDDADIDEKIADSEALLSDTEFEFLCDLKAAFDGLTLKMLLGDDKTVSAAMVRRFNEHQKDWEYIKSHIRNAKNAGNGLYEKSKKFDGINAAYLALQSDNEDDRKKAKKIFQDEISSADIPDDVKADFLKKIDDDQFLPIQRTKNNGTIPHQLHRNELEQIIEKQGIYYPFLKDTYQENSHELNKITALINFRVPYYVGPLVEEEQKIADDGKNIPDPTNHWMVRKSNDTITPWNLSQVVDLDKSGRRFIERLTGTDTYLIGEPTLPKNSLLYQKFDVLQELNNIRVSGRRLDIRAKQDAFEHLFKVQKTVSATNLKDFLVQAGYISEDTQIEGLADVNGKNFNNALTTYNYLVSVLGREFVENPSNEELLEEITELQTVFEDKKVLRRQLDQLDGLSDHNREKLSRKHYTGWGRISKKLLTTKIVQNADKIDNQTFDVPRMNQSIIDTLYNTKMNLMEIINNAEDDFGVRAWIDKQNTTDGDEQDVYSLIDELAGPKEIKRGIVQSFRILDDITKAVGYAPKRVYLEFARKTQESHLTNSRKNQLSTLLKNAGLSELVTQVSQYDAAALQNDRLYLYFLQQGKDMYSGEKLNLDNLSNYDIDHIIPQAYTKDNSLDNRVLVSNITNRRKSDSSNYLPALIDKMRPFWSVLSKQGLLSKHKFANLTRTRDFDDMEKERFIARSLVETRQIIKNVASLIDSHFGGETKAVAIRSSLTADMRRYVDIPKNRDINDYHHAFDALLFSTVGQYTENSGLMKKGQLSDSAGNQYNRYIKEWIHAARLNAQSQRVNPFGFVVGSMRNAAPGKLNPETGEITPEENADWSIADLDYLHKVMNFRKITVTRRLKDQKGQLYDESRYPSVLHDAKSKASINFDKHKPVDLYGGFSSAKPAYAALIKFKNKFRLVNVLRQWTYSDKNSEDYILEQIRGKYPKAEMVLSHIPYGQLVKKDGALVTISSATELHNFEQLWLPLADYKLINTLLKTKEDNLVDILHNRLDLPEMTIESAFYKAFDSILSFAFNRYALHQNALVKLQAHRDDFNALNYEDKQQTLERILDALHASPASSDLKKINLSSGFGRLFSPSHFTLADTDEFIFQSVTGLFSTQKTVAQLYQETK

SEQ ID NO: 363 - protein, 1389 aa, Oenococcus kitaharae DSM 17330; identical to SEQ ID NO: 362

SEQ ID NO: 364 - protein, 1399 aa, Olsenella uli
MNLRNTTDEYNIGLDMGTNSVGWAVTDKAGAIAHFKGKPTLGSRLFDAAQTAAGARIHRSQRRRYVRRRWRLDLLQSLFQDEVSKVDSEFFCRLRQSRLYVGDREKGHADYTWPIFNDSDFNEVDYYKRFPTIYHLRKWLMETDEKADIRLIYLATHNIVKHRGNFLRENNKSLSSRDANPAQAVKSLRLALNDWCSERDYECAWKGEEDDGAIDEAILNVLADGEKGRSDQAKEIAKLTGVDCGDAKQSKQCNEAIAKAIVGLKVEMKNIFGEFPAEKTSYIYLSSDEDVEAVRESCPDDSGELFQALCKLYSAYILQELLSYADPSGQTISANMVAKYKQYGRDLRLLKELTRTYAPQKYDLFFRGETYAGSSDYVVDEARGYTRYNLGTTKANYDDFQKSVKELFKGTDALQDERYQEMMVAFGEQKFLRRLKTSDNGSIYYQLHLEELHTILENQGKHYPFLLSEEDKIESLVSFRIPYYVGPLTRKNAAIGHDGKERFAWSSRKDGMEHAVITPWNWEEIIDRDKSAEDFIMRMTGDCTYLQGEPVLPKCSLLYEEFCALNEFNGAHWTVDGDDERRFDAAQRERIMCDLFRRTRSVTYNKVSDWLERKYNFTGARVRGGQGEHGFESKLGSYIFFCKDVFKTDGLDEADYTMIEQIILWSTLFEDRDILKRKIEEAYGGDRLTSEQIKVICKKRFTGWGRLSKRLLTDIKVNTDTGRKSIMDVLREGNPNNGQRSRTMVFMEVLRDEDLGFQKAIDGLNRDYFREHNNGLMDVNDLPGSPAIRRSINQAVRIVDEIASIARKEPTNIFIEVTREEDDPRKKGKRTKRRYDAIKSALEKFKKDDPSLWKELCEKAPGDMDERLSLYFMQRGKCMYSGRPIKIEELHTGKYEVDHIIPRSYIKDDSFENKVLVYREENQHKTDALLIDSSIRQKMGGYWRMLHDAKLVGDKKFRNLFRNHIDDKAMKGFVARQIVETSQMVKLVQTLFEARYPNTRIVPVKAGISHDLREAAGLVKCREANDFHHAHDAFLACRIGLFIQKRHPSVYDNPIGLARIMRDYARMQAREYKKSHCLAHTQGFIVNSFLSSGFDEETGEIFKDDWDAKAEVEGIRRVLNCRQCFISRMPVEGDTRYGGRYWGETIYSPKGKHKHEIPLKQGLDPNLYGGYSDLLYSYFLIYEASDVSSGERVLRFIGIPTSIAARMANQKRLEEYVSRLALQENLEHVRMVRKIMKKQLIEVDNCRLLVTAADAVTNATELAFSLDEMKIISTCAKCINGADPSAIDKIGNAQDSFFDNLKRRGSDRCALLFSQLKLDKLSQNFYMISSDDKSKILISILDRIRAKSNSVDLSLVGGAKHAAQMKFDFNAKLNNPASSFVLIDQSVTGMFERRTRIGL

SEQ ID NO: 365 - protein, 1535 aa, Ornithobacterium rhinotracheale
MNTILGLDLGTNSIGWALIKVLNDKTRLPLEIIDLGVVVIPTDQRTLDKFSKGESISKTAERTKQKGVRKLYERKKLRRERLHRVLNILGFLPEHYSKKIDFKKHLGQFFGNSQPKISYVENDHGKHEFIFMDSYREMLKEFSKHNIKNVPYDWTIYYLRKKALSQKISKEELAWVILNFNKKRGYYQFRDDNADENKENKIEKYYALKVTNVKKEDAQNYTITLENGWIYKNKSKISLLDWVGSTKEFISTEKFDNKGNIIKKKNGEDDRTLKLVDSEKDWIAIKKSTEDRIENYGKTVGTYLYEHLLKDPNQKLNGELINIIDRKFYKNELKQILEKQKEFHPELLNEDLFQKSIIELYPKNSTRQKELKNKDLCYLLIDDVIYYQRDLKKKNSTINKCSFESREYYLNGEKQIQKINCIAKSKPLYQEFRTLQFIKNLKVYEIIDGLEKDITSKLLPDFETKEHFFEWLNDKEKIDQLQLLSYKCFDLHDNVKNDLIAKGIKRPTEKAIRTELLEKYRWNYSKDNDRNFLLNETRFKILKYLKKVDKKLTLTNEQIESLWLLLYSAKDERELKNGLQKFSEKNKLPKKFSDIFISFPPFKKEYGAYSEKALKKLLSLVRFGKYWSFNKIDNNIQNKIMNILNGEVDDSISDRVREKTILLQDKNDFQDLPLWLASYVAYNRFSEVSEIKYWDSPDKIEFLKQHSIGNPIVEKIINETLKLIKDIWVIHGKSCKNFFSEIHIELSREIKSSSKKRAQITNNNTKNQKLNNLIKSLLIEMASDTKYENVTPYSPSQQEILKIYDEGIYSKEENSEKIKEINKIRNNNKISKSDITKYKLWLEQGYISPYTGKIIPLTKLFTAKYQKEHIIPQTKFFDDSFNNKVICEAEVNKLKDNSLAMNFIKAKGGKAVKLSDGETVTILNQEEYKQLVRTSFKKNSIKLRNLLLEEIPDTFTKRQLNDTKYISKLVLSLLSNIVREKGELESTAKRIVSTNGQITSILRNDWGLNNIWNKLITPRFERLNNINKNKIYGNWENKKGKNVFQINYLNDNLSTLNTKRIDHRHHALDALIVACTTRNHINFLNNQYAKSRNQRHDLRAKLKRRETITTEGSKKQVFKDFIKPWESFTQDALKKLETTIVNFKVNKRIINKTINWYKKWEKQKDGTYKKIQKKQTKGDAWAIRKPLHIDTIYGIVCKKLPLKSALENYKNIIDENLKHKIKELKEVNKFDNNQIINFFKECNFIFEDNNIQKVEVYDFKDNRDKTILSSSRQLIDESFTPKKIGKVLDPTIRNILLKHLNSTKYNNKFDSDGNPIKPEKLAFSPEGLKDLNKNIKHLNNNKEHQPIKRVKLFETLGNKIKVGYTQQKNKKFAETATGTNLFLGIYSDNNKRDFKTIPLILAIQREKEGLNPCPDTDEKGNQLLFSLSPNELVFVPNNEERKNPNLVDFENLSKDQIDRIYKFVSCTGSEAYFVPSRTAKPIIENENGTNNKSQRIIEFNEKTSIKNEKNEPVLIKTICWKIEVNRLGKIIKVIK

SEQ ID NO: 366 - protein, 1443 aa, Parabacteroides johnsonii DSM 18315
MIKLLYLEKLKQYTMKKILGLDLGTSSIGWALVNEAENSDEVSSIIKLGVRVNPLTVDEMQNFEKGKSITTNADRTLKRSMRRNLQRYKLRRDALIELLKKVGFITDKTILSEQGNRTTFETYRLRAKAAEEEISLKELARVLLMINKKRGYKSSRKAKGEEEGALIDGMEIAKKLYDEDLTPGQLCLQLLESGKKFFPDFYRSDLQEEFNKIWDFQKQFNLFSFCDVAKEEVKGKNKSQTWAILAKYFVETKKVNVWNEHEAQTENREEVYKLVGLKRTVKGEELKKENYRWRVQALTEQLDLEKIAVVLQEINGQISASSGYLGAISDRSKVLYFNRQTVGQYQMAELNKNPNMSLRNMVFYRQDYLDEFNVIWEKQAEFHKELTPELKKEIRDIIIFYQRRLKSQKGLISFCEFENREVVVEKEGKKQTKIIGCKVIPRSHPLFQEFKIWQTLNNIEVFVGEKKGKRKKSNVSSDLFGDTEDALITEGRRFLYQEEKKILAKELSIKKGLTKAEILRLLFENPQELDINFKQIDGNQTGFALFSAYSNMIEKYGYEPLDFKKPAEDLISQLKTVFTDLGWNTDLLFIDLDKENKEWEKQPYFRLWHLLYSFEGDNTPTGNGKLIEKIMQLCGIEKEYAIELANVSLQDDYGSLSAKAIKKILLYLKEGNQYDMACEYAGYRHSKSSLTKEEIENKVLKDKLEILPKNSLRNPVVEKILNQMVNVINTVMEVYGRPDEIRVELARELKKSAKEREELTKAVAKNTREHEEIRKVLQSEFGMINVSRNDIIRYKLYEELKDNGYKTLYSNQYIPREKLFSKEIDIEHIIPQSRLFDDSLSNKTLEYKSINIEKGNKTAYDFVKEKYGEEGLQQYLNRCENLCKDKKAKLRKLKMELNEIPDGFIDRDLRNTQYIAKKALSMLTEICRRVVATTGSITDKLREDWQLVDVMKELNLPKYEALGLVEVYEDKDGRKIKRIKDWTKRNDHRHHAMDALTVAFTKDVFIQYFNNKNAAWESDSKEHTNIVGIKTRYFESGKAVPPIPLGQFRVEAKCHLENLLVSIKAKNKVVTTNVNCIKKKGGTYKNTQQTPRGQLHLETIYGSHNQYVTKIEKVNASFDAVKIATVSKQDYRNALLKRLEVFGNDPKKAFTGKNSLEKNPIYLDRAQTIQVPDKVQTVELETAYTIRKPVDPTLNVDKVVDKKIRLILEQRLKEYGGDAKKAFVNLDENPIWLNEEKGISIKRVTIRGISKAQALHDKKDKDGNFILDETGKRIPVDFVNTGNNHHVAIYRKPVLDKKGQVIFDDEGNPMYELDEDVVPFFEAVTRANLGIPIIDKDYKKSEGWQFLFSMKQNEYFVFPNEKTGFNPKEVDLLDPDNYAMISPNLFRVQKIGLNDYTFRHHLETTIQNDLKFITWIRCGKSGIKDIVKVRINHIGQIVSVGEY

SEQ ID NO: 367 - protein, 1424 aa, Parabacteroides sp. D13
MKRILGLDLGTNSIGWALVNEAETDEEVSSIIRLGVRVNPLTVDETQNFEKGKSITTNAERTLKRSMRRNLQRYKLRRDALVEFLKELGFITDETILSEQGNRTTFETCRLRAKAAEEEISLEELSRVLLMINKKRGYKSSRKVKKEEDGVLIDGMEIAKKLYEEDLTPGQLCSQLLESGKKVLPDFYRSDLQEELDRIWSVQKQFHPDVFCDAAKEEIKGKNRSQTWAILANYFVWKEEVVGWNDREAKNETIEKECKLVGLKRTTKGYELKKENYRWRAQALTEQLGLEEIAVVLQEINGQINASSGYLGAISDRSKVLYFNHQTVGQYQMAELDKNPHASLRNMVFYRQDYLDEFDRIWEKQAEFHKELTAELKKEIRDMIIFYQRRLKSQKGLISFCEFERLEIVVEKDGKKQTKVIGCKVIPRSHPLFQEFKVWQTLNDIKVLGREKKRNALSASESRALYPEEKEILARELAIKENMKKADVLKLLFENPQELDLNFKQIDGNRTGFSLFSAYSKMIEKYGYEPLDFKKPADEIIGQLRTIFTDLGWNTNLFTIDLTKEGKELEMQPYFRLWHLLYSFEGDNTSTGNGKLIEKIMQLCGVEKEYAVELASLSFQDDYGSLSAKAIKRILPYLKEGNLYDVACEYAGYRHSKSSLTKEEIENKVLKGKLEVLPKNSLRNPVVEKILSQMVNVINTIIDTYGKPDEIRVELARELKKSAKEREELTKAIAKSTREHEEIRKLLQDEFGMMNVSRNDIIRYKLYEELKDNGYKTLYSNQYIPKEKIFSKEIDIEHIIPQSRLFDDSLSNKTLEYKAINIEKGNKTAYDFVKEKYGEEGLQQYINRCESLFNDKKAKLRKLKMEQKDIPDGFIDRDLRNTQYIAKKALAMLNEICRRVVATTGSITDQLREDWQLVDVMKELNLPKYEALGFVETYEDKDGRKIKRIKDWTKRNDHRHHAMDALTVAFTKDAFIQYFNNKNAAQDSGNRNHTNIIGIKTRYFDKGRALPPIPLEQFRIEAKQHLEKLLVSIKAKNKVVTVNVNRTKKRKGENTKIQQTPRGQLHLETVYGSHKQYVTKIEKVNASFDAAKIATVSKRAYRNALLKRLETFGNDPKKAFTGKNALEKNPLYADKYQTIRVPEKVQTVEFETIYTIRKPVDPALNVDKVVDVKVRAILERRLKEYGGDPKKAFVNFWENPIWLNKEKGISIKRVSIRGINNAQSIHVKKDKNGNPIWDENGKQIPVDFVNTGNNHHVAIYRKPVLDKKGQVTFDEDGNLMYELDEVVVPFFEAVTRANLGLPIIDKDYRKSEGWQFLFSMKQNEYFVFPNEKTGFNPKEVDLLNPDNYAMISPNLFRVQTMSKVMYGNNVVRDYKFRHHLETTVKDMKELKDIAYKQYKTLSFGNSVVKIRINHIGQIVSVGEY

SEQ ID NO: 368 - protein, 1428 aa, Parasutterella excrementihominis YIT 11859
MGKTHIIGVGLDLGGTYTGTFITSHPSDEAEHRDHSSAFTVVNSEKLSFSSKSRTAVRHRVRSYKGFDLRRRLLLLVAEYQLLQKKQTLAPEERENLRIALSGYLKRRGYARTEAETDTSVLESLDPSVFSSAPSFTNFFNDSEPLNIQWEAIANSPETTKALNKELSGQKEADFKKYIKTSFPEYSAKEILANYVEGRRAILDASKYIANLQSLGHKHRSKYLSDILQDMKRDSRITRLSEAFGSTDNLWRIIGNISNLQERAVRWYFNDAKFEQGQEQLDAVKLKNVLVRALKYLRSDDKEWSASQKQIIQSLEQSGDVLDVLAGLDPDRTIPPYEDQNNRRPPEDQTLYLNPKALSSEYGEKWKSWANKFAGAYPLLTEDLTEILKNTDRKSRIKIRSDVLPDSDYRLAYILQRAFDRSIALDECSIRRTAEDFENGVVIKNEKLEDVLSGHQLEEFLEFANRYYQETAKAKNGLWFPENALLERADLHPPMKNKILNVIVGQALGVSPAEGTDFIEEIWNSKVKGRSTVRSICNAIENERKTYGPYFSEDYKFVKTALKEGKTEKELSKKFAAVIKVLKMVSEVVPFIGKELRLSDEAQSKFDNLYSLAQLYNLIETERNGFSKVSLAAHLENAWRMTMTDGSAQCCRLPADCVRPFDGFIRKAIDRNSWEVAKRIAEEVKKSVDFTNGTVKIPVAIEANSFNFTASLTDLKYIQLKEQKLKKKLEDIQRNEENQEKRWLSKEERIRADSHGICAYTGRPLDDVGEIDHIIPRSLTLKKSESIYNSEVNLIFVSAQGNQEKKNNIYLLSNLAKNYLAAVFGTSDLSQITNEIESTVLQLKAAGRLGYFDLLSEKERACARHALFLNSDSEARRAVIDVLGSRRKASVNGTQAWFVRSIFSKVRQALAAWTQETGNELIFDAISVPAADSSEMRKRFAEYRPEFRKPKVQPVASHSIDAMCIYLAACSDPFKTKRMGSQLAIYEPINFDNLFTGSCQVIQNTPRNFSDKTNIANSPIFKETIYAERFLDIIVSRGEIFIGYPSNMPFEEKPNRISIGGKDPFSILSVLGAYLDKAPSSEKEKLTIYRVVKNKAFELFSKVAGSKFTAEEDKAAKILEALHFVTVKQDVAATVSDLIKSKKELSKDSIENLAKQKGCLKKVEYSSKEFKFKGSLIIPAAVEWGKVLWNVFKENTAEELKDENALRKALEAAWPSSFGTRNLHSKAKRVFSLPVVATQSGAVRIRRKTAFGDFVYQSQDTNNLYSSFPVKNGKLDWSSPIIHPALQNRNLTAYGYRFVDHDRSISMSEFREVYNKDDLMRIELAQGTSSRRYLRVEMPGEKFLAWFGENSISLGSSFKFSVSEVFDNKIYTENAEFTKFLPKPREDNKHNGTIFFELVGPRVIFNYIVGGAASSLKEIFSEAGKERS

SEQ ID NO: 369 - protein, 1037 aa, Parvibaculum lavamentivorans
MERIFGFDIGTTSIGFSVIDYSSTQSAGNIQRLGVRIFPEARDPDGTPLNQQRRQKRMMRRQLRRRRIRRKALNETLHEAGFLPAYGSADWPVVMADEPYELRRRGLEEGLSAYEFGRAIYHLAQHRHFKGRELEESDTPDPDVDDEKEAANERAATLKALKNEQTTLGAWLARRPPSDRKRGIHAHRNVVAEEFERLWEVQSKFHPALKSEEMRARISDTIFAQRPVFWRKNTLGECRFMPGEPLCPKGSWLSQQRRMLEKLNNLAIAGGNARPLDAEERDAILSKLQQQASMSWPGVRSALKALYKQRGEPGAEKSLKFNLELGGESKLLGNALEAKLADMFGPDWPAHPRKQEIRHAVHERLWAADYGETPDKKRVIILSEKDRKAHREAAANSFVADFGITGEQAAQLQALKLPTGWEPYSIPALNLFLAELEKGERFGALVNGPDWEGWRRTNFPHRNQPTGEILDKLPSPASKEERERISQLRNPTVVRTQNELRKVVNNLIGLYGKPDRIRIEVGRDVGKSKREREEIQSGIRRNEKQRKKATEDLIKNGIANPSRDDVEKWILWKEGQERCPYTGDQIGFNALFREGRYEVEHIWPRSRSFDNSPRNKTLCRKDVNIEKGNRMPFEAFGHDEDRWSAIQIRLQGMVSAKGGTGMSPGKVKRFLAKTMPEDFAARQLNDTRYAAKQILAQLKRLWPDMGPEAPVKVEAVTGQVTAQLRKLWTLNNILADDGEKTRADHRHHAIDALTVACTHPGMTNKLSRYWQLRDDPRAEKPALTPPWDTIRADAEKAVSEIVVSHRVRKKVSGPLHKETTYGDTGTDIKTKSGTYRQFVTRKKIESLSKGELDEIRDPRIKEIVAAHVAGRGGDPKKAFPPYPCVSPGGPEIRKVRLTSKQQLNLMAQTGNGYADLGSNHHIAIYRLPDGKADFEIVSLFDASRRLAQRNPIVQRTRADGASFVMSLAAGEAIMIPEGSKKGIWIVQGVWASGQVVLERDTDADHSTTTRPMPNPILKDDAKKVSIDPIGRVRPSND

SEQ ID NO: 370 - protein, 1058 aa, Pasteurella multocida subsp. gallicida X73
MQTTNLSYILGLDLGIASVGWAVVEINENEDPIGLIDVGVRIFERAEVPKTGESLALSRRLARSTRRLIRRRAHRLLLAKRFLKREGILSTTDLEKGLPNQAWELRVAGLERRLSAIEWGAVLLHLIKHRGYLSKRKNESQTNNKELGALLSGVAQNHQLLQSDDYRTPAELALKKFAKEEGHIRNQRGAYTHTFNRLDLLAELNLLFAQQHQFGNPHCKEHIQQYMTELLMWQKPALSGEAILKMLGKCTHEKNEFKAAKHTYSAERFVWLTKLNNLRILEDGAERALNEEERQLLINHPYEKSKLTYAQVRKLLGLSEQAIFKHLRYSKESAESATFMELKAWHAIRKALENQGLKDTWQDLAKKPDLLDEIGTAFSLYKTDEDIQQYLEGKLPDSVINALLVSLNFDKFIELSLKSLRKILPLMEQGKRYDQACHEIYGHHYGEKNQQISQLLPVIPTQEIRNPVVLRTLSQARKVINAIIRQYGSPARVHIETGRELGKSFKERREIQKQQEDNRTKRESAVQKFKELFSDFSSEPKSKDILKFRLYEQQHGKCLYSGKEINIHRLNEKGYVEIDHALPFSRTWDDSFNNKVLVLASENQNKGNQTPYEWLQGKINSERWKNFVALVLGSQCSAAKKQRLLTQVIDDNKFIDRNLNDTRYIARFLSNYIQENLLLVGKNKKNVFTPNGQITALLRSRWGLIKVRENNDRHHALDAIVVACATPSMQQKITRFIRFKEVHPYKIENRYEMVDQESGEIISPHFPEPWAYFRQEVNIRVFDNHPDTVLKEMLPDRPQANHQFVQPLFVSRAPTRKMSGQGHMETIKSAKRLAEGISVLRIPLTQLKPNLLENMVNKEREPALYVGLKARLAEFNQDPAKAFATPFYKQGGQQVKAIRVELVQKSGVLVRQGNGVADNAPGSIVRTDVFIKNNKFFLVPIYTWQVAKGILPNKAIVAHKNEDEWEEMDEGAKFKFSIFPNDLIELRTKTECFLGYYIGPDRHNGSISLREHDSEISKGNAGVYRVGVKLALSLEKYHIDELGKNRRICRPHQRRPVR

SEQ ID NO: 371 - protein, 1056 aa, Pasteurella multocida subsp. multocida str. P52VAC
MQTTNLSYILGLDLGIASVGWAVVEINENEDPIGLIDVGVRIFERAEVPKTGESLALSRRLARSTRRLIRRRARRLLLAKRFLKREGILSTTDLEKGLPNQAWELRVAGLERRLSAIEWGAVLLHLIKHRGYLSKRKNESQTNNKELGALLSGVAQNHQLLQSDDYRTPAELALKKFAKEEGHIRNQRGAYTHTFNRLDLLAELNLLFAQQHQFGNPHCKEHIQQYMTELLMWQKPALSGEAILKMLGKCTHEKNEFKAAKHTYSAERFVWLTKLNNLRILEDGAERALNEEERQLLINHPYEKSKLTYAQVRKLLGLSEQAIFKHLRYSKENAESATFMELKAWHAIRKALENQGLKDTWQDLAKKPDLLDEIGTAFSLYKTDEDIQQYLTNKVPNSVINALLVFLNFDKFIELALKSLRKILPLMEQGKRYDQACREIYGHHYGEANQKTSQLLPAIPAQEIRNPVVLRTLSQARKVINAIIRQYGSPARVHIETGRELGKSFKERREIQKQQEDNRTKRESAVQKFKELFSDFSSEPKSKDILKFRLYEQQHGKCLYSGKEINIHRLNEKGYVEIDHALPFSRTWDDSFNNKVLVLASENQNKGNQTPYEWLQGKINSERWKNFVALVLGSQCSAAKKQRLLTQVIDDNKFIDRNLNDTRYIARFLSNYIQENLLLVGKNKKNVFTPNGQITALLRSRWGLIKIRENNDRHHALDAIVVACATPSMQQKITRFIRFKEVHPYKIENRYEMVDQESGEIISPHFPEPWAYFRQEVNIRVFDNHPDTVLKEMLPDRPQANHQFVQPLFVSRAPTRKMSGQGHMETIKSAKRLAEGISVLRIPLTQLKPNLLENMVNKEREPALYAGLKARLAEFNQDPAKAFTTPFYKQGGQQVKAIRVEQVQKSGVLVRENNGVADNASIVRTDVFIKNNKFFLVPIYTWQVAKGILPNKAIVAHKNEDEWEEMDEGAKFKFSLFPNDLVELKTKKEYFFGYYIGLDRATGNISLKEHDGEISKGKDGVYRVGVKLALSFEKYQVDELGKNRQICRPQQRQPVR

SEQ ID NO: 372 - protein, 1056 aa, Pasteurella multocida
MQTTNLSYILGLDLGIASVGWAVVEINENEDPIGLIDVGVRIFERAEVPKTGESLALSRRLARSTRRLIRRRAHRLLLAKRFLKREGILSTIDLEKGLPNQAWELRVAGLERRLSAIEWGAVLLHLIKHRGYLSKRKNESQTNNKELGALLSGVAQNHQLLQSDDYRTPAELALKKFAKEEGHIRNQRGAYTHTFNRLDLLAELNLLFAQQHQFGNPHCKEHIQQYMTELLMWQKPALSGEAILKMLGKCTHEKNEFKAAKHTYSAERFVWLTKLNNLRILEDGAERALNEEERQLLINHPYEKSKLTYAQVRKLLGLSEQAIFKHLRYSKENAESATFMELKAWHAIRKALENQGLKDTWQDLAKKPDLLDEIGTAFSLYKTDEDIQQYLTNKVPNSVINALLVSLNFDKFIELSLKSLRKILPLMEQGKRYDQACREIYGHHYGEANQKTSQLLPAIPAQEIRNPVVLRTLSQARKVINAIIRQYGSPARVHIETGRELGKSFKERREIQKQQEDNRTKRESAVQKFKELFSDFSSEPKSKDILKFRLYEQQHGKCLYSGKEINIHRLNEKGYVEIDHALPFSRTWDDSFNNKVLVLASENQNKGNQTPYEWLQGKINSERWKNFVALVLGSQCSAAKKQRLLTQVIDDNKFIDRNLNDTRYIARFLSNYIQENLLLVGKNKKNVFTPNGQITALLRSRWGLIKARENNNRHHALDAIVVACATPSMQQKITRFIRFKEVHPYKIENRYEMVDQESGEIISPHFPEPWAYFRQEVNIRVFDNHPDTVLKEMLPDRPQANHQFVQPLFVSRAPTRKMSGQGHMETIKSAKRLAEGISVLRIPLTQLKPNLLENMVNKEREPALYAGLKARLAEFNQDPAKAFATPFYKQGGQQVKAIRVEQVQKSGVLVRENNGVADNASIVRTDVFIKNNKFFLVPIYTWQVAKGILPNKAIVAHKNEDEWEEMDEGAKFKFSLFPNDLVELKTKKEYFFGYYIGLDRATGNISLKEHDGEISKGKDGVYRVGVKLALSFEKYQVDELGKNRQICRPQQRQPVR

SEQ ID NO: 373 - protein, 1364 aa, Pediococcus acidilactici DSM 20284
MGDRKYNLGLDIGTSSIGFAAVDENNQPIRVKGKTAIGVRLFEEGKTAADRRGFRTTRRRLSRRRWRINLLNEIFDAHLAEVDPTFLARLKESNRSNLDPKKSFQGSLLFPERKDYQFYEEYPTIYHLRKALMEKDRKFDFREIYLAVHHIIKYRGNFLNGTPMRSFKVENIELDTLFDQLNQLYAEIVPDNELAFDLAQVADVKDVLSSTTIYKMDKKKQLVKMMLLPASNKALQSENKKIVTQFVNAILNYKFKLDVLLQVETDADWSLKLNDEGADDKLEEFTGDLDENRLEIIDLLQRLHNWFSLNEITKDGNSLSAAMVEKYENHHHHLGLLKKVIENHPDAKKAKALKETYTAYVGKTDDKTQNQDDFYKAVEKNLDDSPDAKEIKRLIQLDQFMPKQRTGQNGAIPHQLHQQELDQIIEKQSKYYPFLAEPNPNVKRRKDAPYKLDELIAFKIPYYVGPLVTPEEQAQNGENVFAWMKRKAAGPITPWNFDEKVDRMESANRFIRRMTTKDTYLFGEDVLPAESMIYQKFVVLNELNNLKINGRHLSLKDKQDVYNDLFKQQKTVSIKALQNYYVTKKKAATAPTVGGLADPKKFLSSLSTYIDFKNMFGERVNDPQFQEDLEQIVEWSTIFEDRGIFKAKLQALGWLSEKQIQQLVAKRYKGWGRLSKKLLTGLKNAEGYSILDEMWRSTGNFMQIQSRPEFAALIQQANEKQFEGNDPDNVWENIENILGDAYTSPQNKKAIRQVVKVVQDIEKAVGNPPEKIAIEFTREAAANPQRTQSRLRTLEKLYESAEEVVDAGLTAELAEFKENKHVLSDKYYLYFTQLGRDVYTGDTISLDKLNDYDVDHILPQSFIKDDSLDNRVLTIRAVNNGKSDNVPAKMFGKKMGSFWRYLLDNGMISKRKYNNLITDPDNISKYAQKGFINRQLVETSQVIKLTANILNGIYDKDTEIIEVPAKMNSQMRKMFDLVKVREVNDYHHAFDAYLTIFIGNYLYKCYPKLQPYFVYDNFKKFGNKEDIGHKRFNFLGKIEREKKVVAPETGEILWSNVAPNETIKQIKKVYDYKFMIVSREITTRRAELFNQTVYPKNYHGKLIPIKEDRPTDLYGGYSGNTDAYLAIVALEDKKKGKYFKVVGIPTRVAAKLEKLKQQDSQQYLQALHKVIAPQFTKSTKKGIKKTEFEIVLDKVHYRQLVQDGPVKMMLGSSTYKYNAKQLVLSEKALQVIADDRKFDETQKDDNLIAVYDEILSIVNQSFDLYDINGFRKKLNDNRDQFIDLPAETKYEGRKVVAHGKREMILEILKGLHANAAFGNLKPIGFSTAFGQLQVPNGIILSKNAILIHQSPSGLFERKIKLSDL

SEQ ID NO: 374 - protein, 1366 aa, Pediococcus acidilactici MA18/5M
MGDRKYNLGLDIGTSSIGFAAVDENNQPIRVKGKTAIGVRLFEEGKTAADRRGFRTTRRRLSRRRWRINLLNEIFDAHLAEVDPTFLARLKESNRSNLDPKKSFQGSLLFPERKDYQFYEEYPTIYHLRKALMEEDRKFDIREIYLAVHHIIKYRGNFLNGTPMRSFKVENIELDTLFDQLNQLYAEIVPDNELAFDLAQVADVKDVLSSTTIYKMDKKKQLVKMMLLPASNKALQSENKKIVTQFVNAILNYKFKLDVLLQVETDADWSLKLNDEGADDKLEEFTGDLDENRLEIIDLLQRLHNWFSLNEITKDGNSLSAAMVEKYENHHHHLGLLKKVIENHPDAKKAKALKETYTAYVGKTDDKTQNQDDFYKAVEKNLDDSPDAKEIKRLIQLDQFMPKQRTGQNGAIPHQLHQQELDQIIEKQSKYYPFLAEPNPNVKRRKDAPYKLDELIAFKIPYYVGPLVTPEEQAQNKENVFAWMKRKAAGPITPWNFDEKVDRMESANRFIRRMTTKDTYLFGEDVLPAESMIYQKFVVLNELNNLKINGRHLSLKDKQDVYNDLFKQQKTVSIKALQNYYVTKKKAATAPTVGGLADPKKFLSSLSTYIDFKNMFGERVNDPQFQEDLEQIVEWSTIFEDRGIFKAKLQALGWLSEKQIQQLVAKRYKGWGRLSKKLLTGLKNAEGYSILDEMWRSTENFMQIQTRPEFAALIQQANEKQFEGNDPNNVWENIESILGDAYTSPQNKKAIRQVVKVVQDIEKAVGNPPEKIAIEFTREAAANPQRTQSRLRTLEKLYESAEEVVDAGLTAELAEFKENKHVLSDKYYLYFTQLGRDVYTGDTISLDKLNDYDVDHILPQSFIKDDSLDNRVLTIRAVNNGKSDNVPAKMFGKKMGSFWRYLLDNGMISKRKYNNLITDPDNISKYAQKGFINRQLVETSQVIKLTANILNGIYDKDTEIIEVPAKMNSQMRKMFDLVKVREVNDYHHAFDAYLTIFIGKYLYKCYPKLRPYFVYGKFKKFGDNEDIEVGDGRFNFLNRIERLKNVTDPETGEILWSNVAPNETIKQIKKVYNYKFMLVSRETTTRRAELFNQTVYPKNYRGKLIPIKEDRPTDLYGGYSGNTDAYLAIVALEDKKKGKYFKVVGIPTRAAAKLEKLKQQDSQQYLQALHKVIAPQFTKSTKKGIKKTEFEIVLDKVHYRQLVQDGPVKMMLGSSTYKYNAKQLVLSEKALQVIADDRKFDETQKDDNLIAVYDEILSIVNQSFDLYDINGFRKKLNDNRDQFIDLPAETKYEGRKVVAHGKREMILEILKGLHANAAFGNLKPIGFSTAFGQLQVPNGIILSKNAILIHQSPSGLFERKIKLSDL

SEQ ID NO: 375 - protein, 1364 aa, Peptoniphilus duerdenii ATCC BAA-1640
MKNLKEYYIGLDIGTASVGWAVTDESYNIPKFNGKKMWGVRLFDDAKTAEERRTQRGSRRRLNRRKERINLLQDLFATEISKVDPNFFLRLDNSDLYREDKDEKLKSKYTLFNDKDFKDRDYHKKYPTIHHLIMDLIEDEGKKDIRLLYLACHYLLKNRGHFIFEGQKFDTKNSFDKSINDLKIHLRDEYNIDLEFNNEDLIEIITDTTLNKTNKKKELKNIVGDTKFLKAISAIMIGSSQKLVDLFEDGEFEETTVKSVDFSTTAFDDKYSEYEEALGDTISLLNILKSIYDSSILENLLKDADKSKDGNKYISKAFVKKFNKHGKDLKTLKRIIKKYLPSEYANIFRNKSINDNYVAYTKSNITSNKRTKASKFTKQEDFYKFIKKHLDTIKETKLNSSENEDLKLIDEMLTDIEFKTFIPKLKSSDNGVIPYQLKLMELKKILDNQSKYYDFLNESDEYGTVKDKVESIMEFRIPYYVGPLNPDSKYAWIKRENTKITPWNFKDIVDLDSSREEFIDRLIGRCTYLKEEKVLPKASLIYNEFMVLNELNNLKLNEFLITEEMKKAIFEELFKTKKKVTLKAVSNLLKKEFNLTGDILLSGTDGDFKQGLNSYIDFKNIIGDKVDRDDYRIKIEEIIKLIVLYEDDKTYLKKKIKSAYKNDFTDDEIKKIAALNYKDWGRLSKRFLTGIEGVDKTTGEKGSIIYFMREYNLNLMELMSGHYTFTEEVEKLNPVENRELCYEMVDELYLSPSVKRMLWQSLRVVDEIKRIIGKDPKKIFIEMARAKEAKNSRKESRKNKLLEFYKFGKKAFINEIGEERYNYLLNEINSEEESKFRWDNLYLYYTQLGRCMYSLEPIDLADLKSNNIYDQDHIYPKSKIYDDSLENRVLVKKNLNHEKGNQYPIPEKVLNKNAYGFWKILFDKGLIGQKKYTRLTRRTPFEERELAEFIERQIVETRQATKETANLLKNICQDSEIVYSKAENASRFRQEFDIIKCRTVNDLHHMHDAYLNIVVGNVYNTKFTKNPLNFIKDKDNVRSYNLENMFKYDVVRGSYTAWIADDSEGNVKAATIKKVKRELEGKNYRFTRMSYIGTGGLYDQNLMRKGKGQIPQKENTNKSNIEKYGGYNKASSAYFALIESDGKAGRERTLETIPIMVYNQEKYGNTEAVDKYLKDNLELQDPKILKDKIKINSLIKLDGFLYNIKGKTGDSLSIAGSVQLIVNKEEQKLIKKMDKFLVKKKDNKDIKVTSFDNIKEEELIKLYKTLSDKLNNGIYSNKRNNQAKNISEALDKFKEISIEEKIDVLNQIILLFQSYNNGCNLKSIGLSAKTGVVFIPKKLNYKECKLINQSITGLFENEVDLLNL

SEQ ID NO: 376 - protein, 1087 aa, Phascolarctobacterium succinatutens YIT 12067
MLRMKYAIGLDIGIASVGYAVLALDHEENPWGIIRLGSRIFDVAENPKDGASLALPRREARSVRRRLRRHHHRLERIKNLLINTEFITKDELLHLYDGNLSDVYELRVKALDYSVTNAELTRILLHLAQRRGFKSNRKSDANDKEAGQLLEAVSANAKRMQENHYRTVGEMFYKDDLFSKYKRNKGGTYLTTVHRDMIAAEARTILEKQFALGNNICTQDFIDKYLSILLSQRQFDEGPGEPSPYAGNQIANMIGKCTFEPNEYRAAKASYSFERFNLLQKVNHLRLLLEGKSIALDNEQRKKIIALAHDKADLRYSHIRKALGLDEKVLFNTITYNDDVSVIEKKTKFNFLQAYHQIKKVLAEDMQKLTTEQLDNIGQILSTYKSDNKRTEELSALGLEKKIIDALLGINGLSKFAHLSLKALRKINPYLEEGKIYNEACTAAGYDFKAHANTQKTELLPAYKEEMDDITSPVARRAIAQSIKVINAIIREQKGSPLYINIELAREMAKGFDERTQIDKANKENQAKNERIMERIRTEFHKANPTGMDLIKLKLWEEQDGRSPYSQKAISINRLFEPGYVDIDHIVPYSISFDDSFKNKVLVFSDENRDKGNRLPIAYLQSKFGAKAAENFMIWVQSNIKDYKKRQKLLKREITEEDINKFKERNLQDTKTISRFLYNYINDYLLFAPSDTGKKKRVTAVNGTITAYLRKRWGINKIRANGDKHHAVDAVVIACTTDKMIKDLSSFSRYHELEYTHTDTESFLVNSLTGEILKRFPYPWEDFRPELMARLSDNPADALRKLNLIFYHGIDLSTIKPIFVSRMPRHKVTGAAHKATIKSARCLDNGIVICKTSLQNLKLDKEGEIANYYAPESDTILYNALKERLRSYDNKPAKAFAEPFYKPKADGTPGPLVKKVKVYEKSTLNVAVQQNTAVADNDSMVRVDVFHVKGNGYYLVPIYIADTLKKELPNKAIVAYKPYADWPVMDDSNFIFSLYPNDLIKFEHKNSVKFAKVNKESTLNDFYSTKSEIVYFKGCNINTGAITIINHENTYVVSSLGVKTLPSLEKYQADVLGNYTKVKKEVRKPFR

SEQ ID NO: 377 - protein, 1333 aa, Planococcus antarcticus DSM 14505
MKNYTIGLDIGVASVGWVCIDENYKILNYNNRHAFGVHEFESAESAAGRRLKRGMRRRYNRRKKRLQLLQSLFDSYITDSGFFSKTDSQHFWKNNNEFENRSLTEVLSSLRISSRKYPTIYHLRSDLIESNKKMDLRLVYLALHNLVKYRGHFLQEGNWSEAASAEGMDDQLLELVTRYAELENLSPLDLSESQWKAAETLLLNRNLTKTDQSKELTAMFGKEYEPFCKLVAGLGVSLHQLFPSSEQALAYKETKTKVQLSNENVEEVMELLLEEESALLEAVQPFYQQVVLYELLKGETYVAKAKVSAFKQYQKDMASLKNLLDKTFGEKVYRSYFISDKNSQREYQKSHKVEVLCKLDQFNKEAKFAETFYKDLKKLLEDKSKTSIGTTEKDEMLRIIKAIDSNQFLQKQKGIQNAAIPHQNSLYEAEKILRNQQAHYPFITTEWIEKVKQILAFRIPYYIGPLVKDTTQSPFSWVERKGDAPITPWNFDEQIDKAASAEAFISRMRKTCTYLKGQEVLPKSSLTYERFEVLNELNGIQLRTTGAESDFRHRLSYEMKCWIIDNVFKQYKTVSTKRLLQELKKSPYADELYDEHTGEIKEVFGTQKENAFATSLSGYISMKSILGAVVDDNPAMTEELIYWIAVFEDREILHLKIQEKYPSITDVQRQKLALVKLPGWGRFSRLLIDGLPLDEQGQSVLDHMEQYSSVFMEVLKNKGFGLEKKIQKMNQHQVDGTKKIRYEDIEELAGSPALKRGIWRSVKIVEELVSIFGEPANIVLEVAREDGEKKRTKSRKDQWEELTKTTLKNDPDLKSFIGEIKSQGDQRFNEQRFWLYVTQQGKCLYTGKALDIQNLSMYEVDHILPQNFVKDDSLDNLALVMPEANQRKNQVGQNKMPLEIIEANQQYAMRTLWERLHELKLISSGKLGRLKKPSFDEVDKDKFIARQLVETRQIIKHVRDLLDERFSKSDIHLVKAGIVSKFRRFSEIPKIRDYNNKHHAMDALFAAALIQSILGKYGKNFLAFDLSKKDRQKQWRSVKGSNKEFFLFKNFGNLRLQSPVTGEEVSGVEYMKHVYFELPWQTTKMTQTGDGMFYKESIFSPKVKQAKYVSPKTEKFVHDEVKNHSICLVEFTFMKKEKEVQETKFIDLKVIEHHQFLKEPESQLAKFLAEKETNSPIIHARIIRTIPKYQKIWIEHFPYYFISTRELHNARQFEISYELMEKVKQLSERSSVEELKIVFGLLIDQMNDNYPIYTKSSIQDRVQKFVDTQLYDFKSFEIGFEELKKAVAANAQRSDTFGSRISKKPKPEEVAIGYESITGLKYRKPRSVVGTKR

SEQ ID NO: 378 - protein, 1197 aa, Porphyromonas sp. oral taxon 279 str. F0450
MLMSKHVLGLDLGVGSIGWCLIALDAQGDPAEILGMGSRVVPLNNATKAIEAFNAGAAFTASQERTARRTMRRGFARYQLRRYRLRRELEKVGMLPDAALIQLPLLELWELRERAATAGRRLTLPELGRVLCHINQKRGYRHVKSDAAAIVGDEGEKKKDSNSAYLAGIRANDEKLQAEHKTVGQYFAEQLRQNQSESPTGGISYRIKDQIFSRQCYIDEYDQIMAVQRVHYPDILTDEFIRMLRDEVIFMQRPLKSCKHLVSLCEFEKQERVMRVQQDDGKGGWQLVERRVKFGPKVAPKSSPLFQLCCIYEAVNNIRLTRPNGSPCDITPEERAKIVAHLQSSASLSFAALKKLLKEKALIADQLTSKSGLKGNSTRVALASALQPYPQYHHLLDMELETRMMTVQLTDEETGEVTEREVAVVTDSYVRKPLYRLWHILYSIEEREAMRRALITQLGMKEEDLDGGLLDQLYRLDFVKPGYGNKSAKFICKLLPQLQQGLGYSEACAAVGYRHSNSPTSEEITERTLLEKIPLLQRNELRQPLVEKILNQMINLVNALKAEYGIDEVRVELARELKMSREERERMARNNKDREERNKGVAAKIRECGLYPTKPRIQKYMLWKEAGRQCLYCGRSIEEEQCLREGGMEVEHIIPKSVLYDDSYGNKTCACRRCNKEKGNRTALEYIRAKGREAEYMKRINDLLKEKKISYSKHQRLRWLKEDIPSDFLERQLRLTQYISRQAMAILQQGIRRVSASEGGVTARLRSLWGYGKILHTLNLDRYDSMGETERVSREGEATEELHITNWSKRMDHRHHAIDALVVACTRQSYIQRLNRLSSEFGREDKKKEDQEAQEQQATETGRLSNLERWLTQRPHFSVRTVSDKVAEILISYRPGQRVVTRGRNIYRKKMADGREVSCVQRGVLVPRGELMEASFYGKILSQGRVRIVKRYPLHDLKGEVVDPHLRELITTYNQELKSREKGAPIPPLCLDKDKKQEVRSVRCYAKTLSLDKAIPMCFDEKGEPTAFVKSASNHHLALYRTPKGKLVESIVTFWDAVDRARYGIPLVITHPREVMEQVLQRGDIPEQVLSLLPPSDWVFVDSLQQDEMVVIGLSDEELQRALEAQNYRKISEHLYRVQKMSSSYYVFRYHLETSVADDKNTSGRIPKFHRVQSLKAYEERNIRKVRVDLLGRISLL

SEQ ID NO: 379 - protein, 1485 aa, Prevotella bivia JCVIHMP010
MKNILGLDLGTNSIGWAKISIDDNGKYIKDSIKLGSRIIPMSQDVLSNFSKGVTLSQTSERTSFRGARRLRERTLLRRERLHRILHLLGFLPKHYEKAIGWDRNDNKTYGKFINHAEPKLAWCKDNNGKMRFLFMDSFHDMLSEFSEKHPELLANGKKIPLDWTIYYLRKKALYKAITKEELAWILLNFNQKRGYYQLRGEEDRDSEANKKEYLELKVIGVEATGEKKGNDIWYNIHLENGWIYRRSSKNPLNDWLGKVKSFIVTTDLDADGNPKKDKDGNIKRSFRAPSEGDWTLIKKRTESLLENSGQTVGQFIYNHILEEPSAKIRGNFIRTIERKYYKDELKAILEKQKEFHHELSSESLLTECAKELYKRNIAHQEVLLKKGIIHLLLNDILFYQRPLKIKKSLIDNCPYENYKYVDKKSGDIKVKSIKCIAKSNPFFQEFRLWQFVSNLRLYRKSDDKDVTSEHLVTTDDYANLFTYLNNRKDIKQSVLLKEYFKIKKVKTINGAEYPVRWNYIDDDNKTYPCNETRYDILHALSKTELKSEWLTPERTYRLWHLLYSIESKEETKKALNKLNLSDDFTEAFLTIKPFKKEYGSYSEKAIKKLLSLMRMGYLWSEDEAIKQVGAEIEKTIEGELPDYVLQRLEKSQHNYNKISDFSGLPLWLASYIIYGRHSEAKEIIHWDNPESMMAYIKDFRQHSMRNPIVEQCVLETLRTVHDIWKEIGHIDEIHIELGREMKSTSEQRKAITQNVLHNQNTNIRIKLLLQELKNDNNITGVRPYSPMQQEILRIYEEGALQGLTKEDKDYNDILKISQTAQPTSNELTRYKLWLEQKYRSPYTGKAISLSKLFTSAYQIEHVIPQSRYFDDSLSNKVICESEVNTLKKAMLGMEFIKTCGGQKVHCTLLGDVEIYNEEDYKAFVNEHYSNNRTKRNKLLMEDIPQEFINRQLNDSRYISKMVKQLLSAIVRGQEEVEATSKFVIPCTGGITDRLKKDWGLNDIWNNLVSPRFQRMNALTGSEYFGHWENKEGKRVFQTTMPIQLQQGFSKKRIDHRHHAMDALVIACASRNIISYLNNETAQDTERRRDLRQKLCDKGGSVRKPWDSFTQDTQYALKDIIVTFKNYVRIINKATNYYEHYKTDGKKGMISQKGDELWAIRKPMHKETVFGKVNLRRPKRVSLSKAIDSVDIICNRKLKKYIKARLNEGLQKKQILNIFKELNNVWEGIDVNKIDIWEMSNDKEPMVATRKQLDTSFDEKKIRSISDTGIQKILLNYLITKNNNPELAFTPEGIQEMNSNISEYNDHKKHQPIYKVRVTEPLGAKYPIGTMGNNPKKFVEAQAGTNLYFAIYEDKEGKRNYDTIPLNIAAERLNQQLSPVPETNENNTPLKFYLSPNDLVYVPSEEERHSGNNIQLDKNRIYKMVSSTSKRCFFIHHRVAISLVDKKEFSAQNKMERSIDNEQVMIKSVCWKLITDRLGNIIKVIK

SEQ ID NO: 380 - protein, 1457 aa, Prevotella buccae ATCC 33574
MKTILGLDLGTNSIGWAKVSVDDYGNYLHDIKLGSRIIPMSQDVLGNFDSGVTVSQTAQRTEFRSKRRLVQRNLQRRERLHRVLHVLDFLPAHYDAAIGWDRTEAVTYGKFLNHAEPKLAWEELGNGKRRFLFMDSFHEMVADFARCQPALVADGKKIPLDWTIYYLRKKALTQAITKEELAWILLNFNQKRGYYQLRGEEEEENPTKQEEYYELKVVSVEATDSRKGNDTWYNVHLENGWIYRRSSKISLDDWVGKVKQFIVTTEYEKDGATLKTDKEGYVKRSFRAPNENDWGLRKKRTETLLEMSGKTVGAFIYDHLLQEPADKIRGNFIRTIERHYYKAELEAILAEQCKYHIELRDKEMLEACARELYLNNLPHQRSLMKKDMTYLLLYDLIFYQRPLKSKKALIANCPYEYYEYVDKETGEIKRQNIKCIAKSNPYFQEFRLWQFVLNLRLFDRVEDKEVTANYLPTADDHARLFTYLNDRKEINQETLLKDYFKLKKVKIGNEKEYPIRWNYIEDKEKKYPCNETRYELLMALDRAGIEHKWLDDNNLEYRLWHLLYSVEVKSESETALRKLKNDDAFVNSFLKVKPFKKEYGAYSEKAIKRLLAVMRKGFLWNEQDICDETRKRIEIIIKGDVDEKVKERMGHAAYSFDRVSDFQGLPEWLACYVVYGRHSEAMDIQHWDSPERLMAYINNFKQYSLRNPIVEQCILETLRTVHDIWKETGQIDEIHVELGREMKSTSEERARRTQNVLRNENTNLRIKSLLIELKNDTDICNVHPYSPMQQEILRIYEEGALQELNREDEDFEEISKISQMSQPSGKELNRYKLWLEQKYRSPYTGKAISLAKLFTPAYQIEHVIPQSRYFDDSFTNKVICEAEVNTLKSNLLGYEFIKKHGGEIIHCTTLGDVRIFSESEYKAFVMDHYANNKSKKDKLLMEDIPQEFLSRQMNDSRYISKVVKTLLSNIVRMADESEATSKSVIVCTGGVTDRLKKDWGLNDVWNSIVYSRFERLNRLTGTEAFGHWENKDGKRVFQTSMPLELQRGFRKKRIDHRHHAMDALVIACASRNIVNYLNNESANNPKKREDLRRQLCDKNRVIRKPWETFTQDAYNALENVVVSFKNYVRVINKATNRYEHYDENGKKRFVQQKGSELWAIRKPMHKETYYGHVNLRRKELVTLQKALDDIPSICDKKLRDYISALVEKHFNKRQLLAHFKSTDYYWQKQYVNKVYVWTFSDDIKPLVATRKLLDTSFDAKRIGTITDTGIQKILRNYLEAKGGNATLAFTPEGIAEMNQNISKYNDGKPHQPILKVRITEPMGAKYRVGQTGNKMAKYVEAQSGTNLYFAIYEDSEGKRSYTTVPLDEVAERLKQRLSPVPEKDENDVPLKFYLSPNDLVYVPTEEELQLRECKLNKDRIYKMVSSTGNECHFIPYYVANVIYNKGGFNMQMHRPQS

SEQ ID NO: 381 - protein, 1218 aa, Prevotella buccalis ATCC 35310
MNKRILGLDTGTNSLGWAVVDWDEHAQSYELIKYGDVIFQEGVKIEKGIESSKAAERSGYKAIRKQYFRRRLRKIQVLKVLVKYHLCPYLSDDDLRQWHLQKQYPKSDELMLWQRTSDEEGKNPYYDRHRCLHEKLDLTVEADRYTLGRALYHLTQRRGFLSNRLDTSADNKEDGVVKSGISQLSTEMEEAGCEYLGDYFYKLYHEQGNKVRIRQRYTDRKKHYQHEFDAICEKQELSSELIEDLQRAIFFQLPLKSQRHGVGRCTFERGKPRCADSHPDYEEFRMLCFVNNIQVKGPHDLELRPLTYEEREKIEHLFFRKSKPNFDFEDIAKELAGKKNYAWIHDKEERAYKFNYRMTQGVPGCPTTAQLKSIFGDDWKTGIAETYTLIQKKNGSKSLQEMVDDVWNVLYSFSSVEKLKEFAHHKLQLDEENAEKFAKIKLSHSFAALSLKAIRKFLPFLRKGMYYTHASFFANIPTIVGKEIWNNEQSRKYIMENVGELVFNYQPKHRDVQGTIEMLIKDFLANNFELPAGATDKLYHPSMIETYPHALRNEFGILQLGSPRTNAIRNPMAMRSLHVLRRVVNQLLKESIIDENTEVHVEYARELNDANKRRAIADRQKEQDKQHKKYGDEIRKLYKEETGKDIEPTQTDVLKFQLWEEQNHYCLYTGEQIGITDFIGSNPKFDIEHTIPQSVGGDSTQMNLTLCDNRFNREVKKAKLPTELANHEEILTRIEPWKNKYEQLVKERDKQRTFAGMDKAVKDIRIQKRHKLQMEIDYWRGKYERFTMTEVPEGFSRRQGTGIGLISRYAGLYLKSLFHQADSRNKSNVYVVKGVATAEFRKMWGLQSEYEKKCRDNHSHHCMDAITIACIGKREYDLMAEYYHMEETFRQGRGSKPKFSKPWATFTEDVLNIYKNLLVVHDTPNNMPKHTKKYVQTSKGKVLAQGDTARGSLHLDTYYGAIERDGEIRYVVRRPLSSFTNPKELENIVDETVKRTIKEAIADKNFKQAIAEPIYMNEDKGILIKKVRCFANSVKQPINIRQHRDLSKKEYKQQYHVMNENNYLLAIYEGLVKNKVVREFEIVSYIEAAKYYKRSQDRNIFSSIVPTHSTKYGLPLKTKLLMGQQVLMFEENPDEIQVDNTKDLVKRLYKVVGIEKDGRIKFKHHQEARKEGLTIYSTPYKNNDDYVPIFRQSIKNINILVDGIDFNIDILGKVTLKE

SEQ ID NO: 382 - protein, 1422 aa, Prevotella denticola CRIS 18C-A
MTQKVLGLDLGTNSIGSSVRNLDLSDDLKGQLEFFSSDIFRSSVNKESNGREYSLAAQRSAHSRSRGLNEARRRKLWATLDLLIKYGFCPMSPESLMRWRTYDKQRGLFREYPIDDKNFNAWILLDFDGDGKPDYSSPYQLRRELVIRQFDFDQPIERYKLGRALYHIAQHRGFKSSKGETLSQQETNSKQSLTDDTADVAGEMKASEEKLSKGLSTYMKENNLLTVGAAFAQLEDEGVRVRNNNDYRAIRSQFQREIETIFKFQQGLSVENELYERLVSEKKNIGTIFYKRPLRSQRGNVGKCTLERTKPRCAIGHPLFEKFRAWTLINNIKVRMSEEEQAEQLPMKLRFELYNDCFLAFVRAEFKFEDIRKYLEKRLGVHFSYNDKTINYKDSTSVAGCPITARFRKLLGEDWESFHVDGQKQRQAHGKNNASFHTVSYSTNDIWHFCYDAEEPEAVLSFAQDNLKWEKKKAEELVRIWSAIPQGYAMLSQKAIRNINKMLILGLKYSDAVLLAKVPEIVEITDGEILSVTEDYHRVEAQVGYEKQINNIVNALIAKYKSASEEYRFADHNYEYQLDKSDEKDIIKQIESNIGTRKWSLLDADEQTDILQKVRDKYQNFFRSHERKFVESPKLGECFEEYLMKKFPMVEGERWKKLYHPSQIAIYRPVPANKDRSALRLGNPDIGAIKNPTVLRVLNTLRKRVNQLLDDGIISPDETRVVVETARELNDANRKWALDTYNRIRHDENEKIKKILAEFYPKRDNISTVDIDKARYVIDQREMDYFTEAKTYHKDIKKYKLWLEQGGQCMYTGRTINLSNLFDPNSFDVEHTIPESISFDSSDMNLTLCDAHYNRFIKKNHIPADLPNYDKSVVIDGKEYSPIKPRLQRWADRVERLNRNVEYWRGQARRAQNKDRKDQCMREMHLWKMELEYWTKKLERFTITEVTDEFKNSQLVDTRVITRHAVLYLKSIFPHVDVQRGDVTAKFRKILGIQSVDEKKDRSLHSHHAIDATTLTIIPGAAKRERMLELFAKIEEVNKMLSFSGNEDRTGLKQELDGLKNQLNKEVKACRIGHNVSEIGTFINDNIIINHHVKNQALTPVRRRLRKRGHIVGGMDNPRWQTGDALRGEIHKASYYGAITQYAKDKEGKVLMKEGRPQINPTIKFVIRRELKYKKSSTDSGFASWDDLGKAIVDKELFALMKGQFPEGTSFKDACEQGIYMIKKGKNGEVDTKLYRIRHIRCKTKQKNALKIKEQAYKSEKEYKRYFYAAVGDLYAMCCYTNGKTREFKIYSLYDISCHRKVGVEDIPEFITDKKGNRLMLDYKLHTGDMILLYKENPEELYDLDNVSLSKLLYKINGFENDGLRIRMVNHLVAKEAMGESVKDYAKLPDIIRCGVKTIKFLVMGENRDFVIKNGKISFNHR

SEQ ID NO: 383 - protein, 1375 aa, Prevotella histicola F0411
MKKILGLDLGTTSIGWALVYESENTDEKSSIVRLGVRVNPLSVDEKGNFEKGKAITTNADRQQTHGARINLQRYKLRRENLKDCLQKQGWIGTEALCEEGKTSTFETYMLRAKAAEEEISLHELCRVLFMMNKKRGYKSNRKANNKEDGKLFDGMTVAKKLYEEHLTPAEYSFQLLSSGKKFKQEYYRSDLKEEFDRIWNEQQKYYPEILTDDFKQQLQGKSKGNTSKIFLGKYGIYSADLKGLDRKLQPLKWRVEALKQQVDKEVLAFVISDLNGQIASTSGLLGAISDRSKELYFNKQTVGQYLWTSLKETPHVSIKNKPFYRQDYLDEFEKIWETQATYHKELTPELKQEIRDIIIFYQRPLKSKKGLISVCELEQRKVKVTIDGKEKEISIGPKVAPKSSPMFQEFRIWQNLNNILLIDKGNNSIHPLYEEEKNLLYEELSVKEKLSKAEALKVLNKNSKQWDLNYKEIEGNRTQAVLYDCYNRIIVMTGHEEYNFKKLKASEIRSYVKTTFTGLGFNTDILEFDSSLTGHELEKQPMYQLWHLLYSYESDNSRTGNDALLRKLETAFGFPKEYAAVLSDVVFEDSYGNLSVKAMRKILPHLQAGLNYSQACEEAGYKHSRRSLTKNELDQKEYKEKLELLPKNSLHNPVVEKILNQMINVINAVIDEYGKPDEIRIELARELKIGAAERENMTRSINQGNAENKRIREILEKEFALSYISRNDIIKYKLYEELKSNGFKTLYSDTYISKDKLFSKDFDIEHIIPKARLFDDSLSNKTIEARDVNIAKSNKTAFDFISEKYDQQGIEAYKKKLDILLQDGSISKAKYNRLLMKEADIPSGFIDRDLRDTQYIAKKAYEILSDLVRNVTPTTGAVTSRLREDWQLVDVMKELNFEKYQKLGLVEVIEDRDGRKIKRIKDWTKRNDHRHHAMDALTIAFTKPSYIQYLNNLNARSDKNSSIYGIENKELHREDNKLRFNAPLPINEFRAEARRHLKSILVSVKAKNKVMTQNVNVIKTKHGVIKKVQLTPRGELHNATFYGTKKRPIIKMVKVGAALDEVTIKKVSSSFIREALLDRLHEYNGDAKKAFTGRNSIDKNPIYIDEEHKKTVPALVKTIEWEMYHPTRKLISPDLKIDKVIDKGIREILKTRLAKFNGDAQKAFSNLDENPIYKDEAKKITLKRVSLEGVSSVIPLHTLKDREGKLVVGKDGKPVLGDYVQTSNNHHIAFYMDENGNLQDNVVSFFEAAERKSQGVPVIDKNYNHDKGWNFLFTMKQNEYFVFPNEVTGFNPSEVDLMDEANYSIISPNLYRVQKMSKASGRDYWFRHHLEAMLNDDPKLRNSMFKRITSLKALEGIVKVRINCIGKIVAVGEYD

SEQ ID NO: 384 - protein, 1380 aa, Prevotella intermedia
MKRILGLDLGTTSIGWALVNEAENNNEASSIVRLGVRVNPLTVDEKSNFEKGKAITTNADRQLRHGARINLQRYKLRRQNLHDCLQKQGWLGTEAMYEEGKASTFETYKLRAKAAEEEISLHEFARVLFMLNKKRGYKSNRKANNKEDGQLFDGMTIAKKLYEEHLTPAEYSLQLLNKGKKFTQGYYRSDLNAELERIWDEQKKYYPEILTDEFKQQLEGKTKTNTSKIFLAKYGIYSADLKGLDRKFQPLKWRVEALQQQVDKEVLAFVISDLKGQIANTSGLLGAISDRSKELYFNKQTVGQYLWASLEENPHISIKNKPFYRQDYLDEFEKIWETQAAFHKQLTPELKQEIRDIIIFYQRPLKSKKSLISVCELEQRKVKATIDGKEKEITIGPKVAPKSSPVFQEFRIWQNLNNVLLIDNDTNEKRPLDEVERNLLYKELSIKAKLSKTEALKILNKKGKQWDLNYRELEGNRTQAILFDCYNRIITLTGHEECDFKKIKASEIRHYVSTIFKNLGFSTEILDFDPSLKKHELEKQPMYQLWHLLYSYESDNSRTGNESLLRKLETTFGFPEEYATVLCDVVFEEDYGNLSVKAMREILPYLQAGNDYSQACAYAGYNHSRHSLTKEELDQKVYKERLELLPKNSLRNPVVEKILNQMINVINAIIDEYGKPDEIRIEMARELKSSAADRKKTTHAISQGNAENQRIREILEKEFSLSYISRNDIIKYKLYEELEPNYYKTLYSDTYITKDKLFSKDFDIEHIIPKARLFDDSFSNKTLEARNINLEKSNKTAFDFIKEKYGEDGAEAYKKKLDMLLENDAISRPKYNNLLRAEADIPSDFINRDLRNTQYIAKKACEILGELVKTVTPTTGKITNRLREDWQLVDVMKELNFEKYEKLGLTEIVEDRDGRKIKRIKDWTKRNDHRHHAMDALAIAFTKPSFIQYLNNLNARSNKGDSIYAIENKELHYEEGKLRFNAPIPVNEFRAEAKRHLSAILVSIKAKNKVMTQNVNKIKTKHGIIKKIQLTPRGPLHNETIYGTKMRPIIKMVKVGAALDEATINKVSSPAIREALLKRLNEYSGNAKKAFTGKNTLEKNPIYLNAGRTKTVPSLVKTVEWESFHPTRKLIDKDLNVDKVVDKGIREILKARLEEFNGDAKKAFSNLEENPIYLDEAKKIALKRVSIEGVLSAIPLHTLKNQAGKPITGKDGKPVLGNYVQTSNNHHIAFYYDEDGNLQDNAVSFFEAAERKSQGIPVIDKDYNRDKGWRFLFTMKQNEYFVFPNEATGFIPSEVDLTDEANYGIISPNLYRVQKVSRIDKGTSASRDYWFRHHLETILNDDAKLKNLAFKRIRGLLELKDIIKVRINSTGKIVAVGEYD

SEQ ID NO: 385 - protein, 1425 aa, Prevotella micans F0438
MIQKIFGLDLGTNSIGSSVRNLELGENLTEQLEFFSSDIFGSSVSKNSNGREYSLAGNRSAHRRSRGLNEARRRKLWATLDLLIEHGLCPMSPDSLMQWRTYDKQKGLYRQYPIEDKDFNAWIMLDFNGDGKPDYSSPYQLRRELVVRQFDFDQPIERYKLGRALYHIAQHRGFKSSKGETIADQEKNEKKPIAEEGADIANEMKASETKLSKGLVAYMQENHLKTVGEAFAKLEDERVRIRNNESYRAIRSQYQDEIKEIFTYQKKLSVESELYERLTSEKKGVGTIFYKRPLRSQRGNVGKCTLERNKPRCPIGRPEFEEFRAWTLINNIKIRETAGEPYKQLPIKLRQELLKDCFLSKVKADFKFEDIRKYIEKRLGLSFSNDDKTINYKDSVSIAACPVTVRMKKLLGENWANCRIDGEKRRQAHGKNNNNEHIVSYTEEDIWHVCYNAEDPEEVSNFARKALHWDENKIKELVRLWTSIPQGYAMLSLKAIRNINRMLLLGLKYSDAVLLAKLPDIVPVSDEDILAITKEFLQLEDKLNQEKQINNIVNSLIANYKSKLEENRFADHNYQYQLGEGDDEDINTQIKSHIGAKLWVQIGADEQTKIFQAVRSKYQDFFKSYKRKFVESPKLGELLVAFLTEKFPNVKSKQWERLYHPSQIAIYRPIPVDNDRSKLRLGNPNIGAIKNPTVMRVLNTLRRRVNQLLDDGVISPDETRVVVETARELNDANTKWALDRYNRIRRDENEKIRKILKELNPTTNSISEQDIDKARYIFEQCETDFYTDGKVPYYNKDIKKYKLWLEQGGQCLYTGQTINLTNLFNPNAFDMEHTIPKSISFDNSDQNLTLCESYYNRFIKKNNIPTDMPNYDKDVTINGKEYTAIKPRLQRWKERVDRLSRNVDFWKGQARRAQDKDRKDECIREKHLWDMELAYWKGKLERFTMTDVTDGFKNSQLVDTRVITRHAVLYLKSIFNHVEVQRGETTAEFRKILGLQSIDEKKDRSLHSHHAIDATMLTVIPSAAKRDRMLELFYKIEETKKALKNYNDNNKTGLNLELKGLEEKLDKEKKDCRVGRRVNDLDRFINENIIVSHHTKDQALTPAHRRLRKRGKIVGGKEHPRWQTGDSLRGEIHKASYYGAITQFAKDANGKVLMKDGQAQIDPTIYYVIRRELKYKRSTQDSGFTNWEDLEKVIVDTDLFGLMKGQFPEGTSFKDACEQGFYMIKKGKNGEGDVKTHRIRHVRCKAVKTALRIKEQTYKSSKDYKQFFYAAVGDLYVMCYYTDGKKRDFKIYSLYDISNHRKSGTEDIPKFITDKKGNHLPLDYKLRTGDMVLLYKDNPEELKDLDQVNLKRRLYKVNRFESEGLIILLTHHLSTTTERGCSIGKIENYQNLPTAIRCGIKTIKFLIMGKHRDFVIRNGNIEFKH

SEQ ID NO: 386 - protein, 1506 aa, Prevotella nigrescens ATCC 33563
MKTILGLDLGPNSIGWAKVEVDDEGNYLRNIKLGSRIIPMTQDMLGDFDKGVKVSQTAIRTDFRGNRRLIERHLLRRERLHRVLHALKFLPKHYEDAIGWDRNEPATYGKFVNNSEPKLAWERQEDGSMRFLFMESFNEMVADFAQNQPSLVSDGKKIPLDWTIYYLRKKALTRPIKKEELAWILLNFNQKRGYYQLRGEEEEDNLTKRKEYYKLKVVGVEADGAPKGGKTWYNIHLENGWTARCQSKIPLDDWVGKVKEYIVTTEYEDDGKTPKCDKEGKVKRSFKSPEKDDWQLIKTRTEKFIDDSNKTVGAFIYDYLLEKPFDKIRGKYIRTIERKYYKNELREILREQTKYHEGLHSLEALKICAEELYKNNQQHQEYLLKKDMTFLLLNDLIFYQRPLKSKKSLIADCPYEVYKYDDKLTGKKGQKKIKCIAKSNPYYQEFRLWQFIANLRLFSVTDGKEVTAEYLKTEEDYVRLFSFLNDRKDIKQETFLRSFLKLKKESIGSEKIYPIRWNYIEDANKSYPCNATRHELLLAFDRADIPRELLDVEEREYRLWHLLYSIEAKEETESALRKLKANKAFGDLNIDDAFVNSFLKIKPFEKEYGAYSEKAIKKLLAVMRRGSLWKEADICEATKQNIAKILQNDIDEKLKKKIEAAVSSFNKLSDFQGLPTWLACYVVYGRHSEAAQIQCWQSPEDLKTYINKFKQHSLRNPIVEQCLLETLRTVYDIWKDAGQIDEIHIELGRNMKSTAEQRARKTKDILRNENTNLRIKNLLVELKNDDKIENVRPYSPSQQEILRIYEEGALQELSKEDEMFEDISKISKMAQPSPTELSRYKLWLEQKYRSPYTGRVIPLSKLFTTAYQIEHIIPQSRYFDDSFNNKVICESEVNSLKDNMLGYEFIKECGGRIVHCTLLGDVKIFTKEEYKDFVTKHYIDNTYKRDKLLLEDIPQEFSARQLNDSRYISKMVQTVLSNIVRAENEQEATSKFVVSCNGAITNRLKKDWGLNDVWSSIVCPRFKRLNEITKTNAFGHWEDKAGKHVFQTTVPLELQRGFSKKRIDHRHHAMDALVIACASRNIVNYLNNESANSPEKREDLRKKLCDEKRKIRKPWKTFTQDAREALSDVVVSFKNYVRVINKATNYYEHYSSSGNKVMISQKGNDMWAIRKPLHKESVFGRVNLCRKVIVSLKKALENIPAICDKTLRDYINALVEKHFNTRQLLAHFKSINYRLNRQCVEKVEVWQFSDEKIEMVARRKSLDTSFDDKQISSITDTGIQKILLNYLQTKDGNAEIAFTPEGIEEMNKNISLYNDGKAHQPILKVRVATPKGMKYPVGQTGNKATKFVVAEKGTNLYFAIYENELGVRSYDTIPLNIVVERLKEGLSPVPQANEADIPLKFYLSPNDLVYVPTKENEDELCRDRIYKFVDSSGTTANFVPHTSANTIYNVDKEYAEKCCNGAVFLNEYGLGSPQSKNQRALTGEMIKEICWKLKVDRLGNIIKVIK

SEQ ID NO: 387 - protein, 1380 aa, Prevotella nigrescens F0103
MKRILGLDLGTTSIGWALVNEAESNNEASSIVRLGVRVNPLTVDEKSNFEKGKAITTNADRQLRHGARINLQRYKLRRQNLHDCLQKQGWLGTEAMYEEGKASTFETYKLRAKAAEEEISLHEFARVLFMLNKKRGYKSNRKANNKEDGQLFDGMTIAKKLYEEHLTPAEYSLQLLNKGKKFTQGYYRSDLNAELERIWDEQKKYYPEILTDEFKQQLEGKTKTNTSKIFLAKYGIYSADLKGLDRKLQPLKWRVEALKQQVDKEVLAFVISDLKGQIANTSGLLGAISDRSKELYFNKQTVGQYLWASLEENPHISIKNKPFYRQDYLDEFEKIWETQATFHKQLTPELKQEIRDIIIFYQRPLKSKKSLISVCELEQRKVKATIDGKEKEITIGPKVAPKSSPVFQEFRIWQNLNNVLLIDNDTNEKRPLDEDERYLLYKELSIKAKLSKTEALKILNKKGKQWDLNYKELEGNRTQAILFDCYNRIITLTGHEECDFKKIKASEIRHYVSTIFKNLGFSTEILDFDPSLEKHELEKQPMYQLWHLLYSYESDNSRTGNESLLRKLETTFGFPEEYATVLCDVVFEEDYGNLSVKAMRKILPYLQAGNDYSQACAYAGYNHSRHSLTKEELDQKVYKERLELLPKNSLRNPVVEKILNQMINVINAIIDEYGKPDEIRIEMARELKSSAADRKKTTHAINQGNDENQCIREILEKEFALSYISRNDIIKYKLYEELKPNGFKTLYSDTYIPKDKLFSKDFDIEHIIPKARLFDDSYSNKTLEARDINLAKSNKTAFDFVKEKYGEQGAEAYKKKLDMLLGNNVISKPKYNKLLMTEADIPSDFINRDLRNTQYIARKACEILGELVRTVTPTTGKITNRLREDWQLVDVMKELNFEKYEKLGLTEIVEDRDGRKIKRIKDWTKRNDHRHHAMDALAIAFTKPSYIQYLNNLNARSNKGDSIYAIENKELHYEEGKLRFNAPIPVNVFRAEAKRHLSAILVSIKAKNKVMTQNVNKIKTKHGIIKKIQLTPRGPLHNETIYGTKMRPIIKKVKVGAALDEATINKVSSPAIREVLLKRLNEYSGNAKKAFTGKNTLDKNPIYLNAERTKTVPASVKTVEWENYHPIRKPITPDLKVDKVIDKGIGEILKARLEEFNGDAKKAFSNLEENPIYLDQTKKIALKRVSIEGVLSTIPLHTLKNQAGKPIMGKDGKPVLGNYVQTSNNHHIAFYYDEDGNLQDNAVSFFEAAERKSQGISVIDKDYNRDKGWRFLFTMKQNEYFVFPNEATGFIPSEVDLTDEANYGIISPNLYRVQKMSRIEKGTSVSRDYWFRHHLETILNDDSRLKNSAFKRINSLKPLEGIIKVRINSIGKIVAVGEYD

SEQ ID NO: 388 - protein, 1391 aa, Prevotella oralis ATCC 33269
MKKILGLDLGTTSIGWALVNEKENNEELSSIIRLGVRVNPLTVDEKSNFEKGKDITTNADRTKCRSARRNLQRFKLRREALADCLKRHGLMTDETPLCETNNSIIFKTYSNRAKAVCEKIALDDFVRVLFMINKKRGYKSSRKLNTDDEGTLVDGMDVAKLLYNEQITPGEYLLRLFKKGKKTRPDFYLSDLKAELERIWDFQRTFYPEILCNALKEDLKGKSRTQSSAIFYAKYKVSTAKIAGKDKRLQELTWRTDALRKQLTIDEVAYVICSINGEVNGSSQRLSMISDRSKLLYFNHQTIGQYLMQRLEENPNAGLKNIIFYRQDYEDEFNDIWNSQATYHKELTPELKKEVKDIIFYQRGLKSCKWLINYCELEHEEIEVKTPEGKLRKITIGSKTCPKSSPLFQEFKIWQVLNNLQVSPLNSRRKAKRKKDEEPSLFSDEDMNTACRYLNEEEKLTLFKELSIKKELKKKDALKLLFENYKELDLNYKVISGNVTMANLYRAFQDIISLTGNGEFDFQAMPAEEAEKTVEEIFGGLGYKTAFLHFDASLHDKEFERQPAYRLWHLLYSYAGDQSKTGIEALVKRIQELCGFEPEYARILANISFIPDYGNLSSKAMRKILPYMQDGYEYSEACSKAGYRHSASSLTKEEINKKNYKTHLDEIKRNSLRNPIVEKILNQMVNVVNSVIDTYSNIDEIRIEMARELKKSKPEREDMSFAISKATKETERIKGILEQEFKIQHVTRNDIIRYRLYEELKPNGYKTLYSNTYIPREDLFSKKFDIEHIIPKARLFDDSYSNKTLELRDINIEKGNQTAYDFVLSKYGEEGLYKYEQRVEEFKKNNEQAGTKCRKLLMREADIPSDFLNRDLNDSQYIAKKAHELLREIVPTVTATTGSITNRLREDWKLVNVMKELNWEKYDKLGLTEEYKDKDGNTVRHIKDWTKRNDHRHHAMDALTIAFTKPSFIQYLNNLNARSNRGGSIYGIEQKELERENNKLVFIPPIDPKIFRKQAKEHLSNILISIKAKNKVVTKNVNKTKSKSGTNRKVQLTPRGQLHLETVYGKIRTYKTEEIKVGTKLTEELIAKVADKKIREALMQRLSEYGGNIKKAFQNISKHPIWLNGSHTKHVPEKVKIVFFEDVFTIRKAITPDIKIDKVIDSKIRRILQERLNEFGGEASKAFSNLDENPIWFNRDKGIAIKSVKIRGIAKGTAIRVKKDIHGKTIIGNNGYPVANDYVNTGNNHHVAIFRDKDGNLQEHIVSFYEATARAIQNLPIVDRNYNSEKDWKFLFSMKQNEYFVFPNPNTGFNPSEISLKDEKNYALISPNLFRVQKLSHYYYVFRHHLETNVDTNLQLKDITWKRITAVNNLTGAVKVRIDHLGRIVDVGEYK

SEQ ID NO: 389 - protein, 1204 aa, Prevotella ruminicola
MERILGIDTGTNSLGWAIVDKDENQYHLVAKGTNIFSEGVKIEKGIESSKAAERTEHRSVRKHYWRRKIRKIRLLTILSDNDLCPRLKHEQLRQWRLKKVYPTDDTFMEWQRTEDKAQVNPYKFRYICLTQKLDLSDITQRFILGRALYHLNQRRGFLSNRKEATKESEGTVKEGISSLSKDMKDSGCEYLGEYFYQLYQQGKKIRNHYTARKEHYLKEFKAICSKQELDDALIEKLEKAIFDQRPLKSQKGQVGTCTFEKGKSRCPSSHPLYEDFRMYSFINNIKVQVDTLYDKGERSLTDEEKQLIIPLFKRKSKRTFPFEDIAKKIAGKNNYCYIKSNEEKAYKFNYQMDTQVSGSPVNAQLEEIFGEDWLSSVCEVYTLANNKSRFQIMNDVWHVLFFYDDEDKLKEFAKDRLQLDDELAEKFSKISIPNDYAALSLKAIRKIMPYLRDYGLIYSEAVFLANLVDVLPQHVWGIKEMREAAIENVIDVMHSYDKNNIDGITLEGCVKTFLKERYQVSDDNLKKLYHPSMLDPYPRQRPNDEGVFQLGSPRISSVKNPMAMHSLFRLRKVVNLMLKKGYITPDTKVHIEFSRDLNDANKRWAIQTWQRENEKERERCRKEIEKYIASPSDTDILKYQLWEEQNHKCLYTGDEIRITDFLGDNPKYDIEHTIPRSAGGDSTKMNLTLCSSRFNRDEKKTKLPAELVNHDEILERISNWKEKYEDIDKQIRKISTKGATSKEDKDSKIRRRHYLILQRDYWRGKYQRFTMTEVPEGFSRRQGTDISVISRYARMYLKSVFKQVYIVKGIATSDFRKMWGIQDEYAKKERVNHVHHCIDAITIACIGKAEYDKLADYRHQYDDYLFQGKTKPTFDKPWPSFVIDIKHIQDELLIAHYAKDNLEKFTKKNLRGKDGRIIRDKFGNKLQMKGDTSRNSLHNDKFYGAINHEGEIKYVYRTNIEALDAKSIGNIVDPTVRSIIESAIAIHGSLKAAINKGIWMNEEKHIPIKKVRVFRNDVKKPIELKDQRDLSDKDYKQHYYVTNDGNYMMLIFSKLNNKGREIRQHVVINSLEATEVIKSHKRSQVGKVVWESYYSKEGFDLIYKLKSGTMILLYENNRDEVWDLDIRNLQKRLYIITKMKYDGRIYMMHHQEAREKKDLEEKSGSFKINEDYRPLIVNSYNQFNALVQDLDFEINDLGEIRRLI

SEQ ID NO: 390 - protein, 1424 aa, Prevotella sp. C561
MTQKVLGLDLGTNSIGSAVRNLDLSDDLQWQLEFFSSDIFRSSVNKESNGREYSLAAQRSAHRRSRGLNEVRRRRLWATLNLLIKHGFCPMSSESLMRWCTYDKRKGLFREYPIDDKDFNAWILLDFNGDGRPDYSSPYQLRRELVTRQFDFEQPIERYKLGRALYHIAQHRGFKSSKGETLSQQETNSKPSSTDEIPDVAGAMKASEEKLSKGLSTYMKEHNLLTVGAAFAQLEDEGVRVRNNNDYRAIRSQFQHEIETIFKFQQGLSVESELYERLISEKKNVGTIFYKRPLRSQRGNVGKCTLERSKPRCAIGHPLFEKFRAWTLINNIKVRMSVDTLDEQLPMKLRLDLYNECFLAFVRTEFKFEDIRKYLEKRLGIHFSYNDKTINYKDSTSVAGCPITARFRKMLGEEWESFRVEGQKERQAHSKNNISFHRVSYSIEDIWHFCYDAEEPEAVLAFAQETLRLERKKAEELVRIWSAMPQGYAMLSQKAIRNINKILMLGLKYSDAVILAKVPELVDVSDEELLSIAKDYYLVEAQVNYDKRINSIVNGLIAKYKSVSEEYRFADHNYEYLLDESDEKDIIRQIENSLGARRWSLMDANEQTDILQKVRDRYQDFFRSHERKFVESPKLGESFENYLTKKFPMVEREQWKKLYHPSQITIYRPVSVGKDRSVLRLGNPDIGAIKNPTVLRVLNTLRRRVNQLLDDGVISPDETRVVVETARELNDANRKWALDTYNRIRHDENEKIKKILEEFYPKRDGISTDDIDKARYVIDQREVDYFTGSKTYNKDIKKYKFWLEQGGQCMYTGRTINLSNLFDPNAFDIEHTIPESLSFDSSDMNLTLCDAHYNRFIKKNHIPTDMPNYDKAITIDGKEYPAITSQLQRWVERVERLNRNVEYWKGQARRAQNKDRKDQCMREMHLWKMELEYWKKKLERFTVTEVTDGFKNSQLVDTRVITRHAVLYLKSIFPHVDVQRGDVTAKFRKILGIQSVDEKKDRSLHSHHAIDATTLTIIPVSAKRDRMLELFAKIEEINKMLSFSGSEDRTGLIQELEGLKNKLQMEVKVCRIGHNVSEIGTFINDNIIVNHHIKNQALTPVRRRLRKKGYIVGGVDNPRWQTGDALRGEIHKASYYGAITQFAKDDEGKVLMKEGRPQVNPTIKFVIRRELKYKKSAADSGFASWDDLGKAIVDKELFALMKGQFPAETSFKDACEQGIYMIKKGKNGMPDIKLHHIRHVRCEAPQSGLKIKEQTYKSEKEYKRYFYAAVGDLYAMCCYTNGKIREFRIYSLYDVSCHRKSDIEDIPEFITDKKGNRLMLDYKLRTGDMILLYKDNPAELYDLDNVNLSRRLYKINRFESQSNLVLMTHHLSTSKERGRSLGKTVDYQNLPESIRSSVKSLNFLIMGENRDFVIKNGKIIFNHR

SEQ ID NO: 391 - protein, 1483 aa, Prevotella sp. MSX73
MKTILGLDLGTNSIGWAKVSVDDYGNYLHDIKLGSRIIPMSQDVLGNFDSGVTVSQTAQRTEFRSKRRLVQRNLQRRERLHRVLHVLDFLPAHYDAAIGWDRTEAVTYGKFLNHAEPKLAWEELGNGKRRFLFMDSFHEMVADFARCQPALVADGKKIPLDWTIYYLRKKALTQAITKEELAWILLNFNQKRGYYQLRGEEEEENPTKQEEYYELKVVSVEATDSRKGNDTWYNVHLENGWIYRRSSKISLDDWVGKVKQFIVTTEYEKDGTTLKTDKEGNVKRSFRAPNENDWGLRKKRTETLLEMSGKTVGAFIYDHLLQEPADKIRGNFIRTIERHYYKAELEAILAEQCKYHIELRDKEMLEACARELYLNNLPHQRSLMKKDMTYLLLYDLIFYQRPLKSKKALIANCPYEYYEYVDKETGEIKRQNIKCIAKSNPYFQEFRLWQFVLNLRLFDRVEDKEVTANYLPTADDHARLFTYLNDRKEINQETLLKDYFKLKKVKIGNEKEYPIRWNYIEDKEKKYPCNETRYELLMALDRAGIEHKWLDDNNLEYRLWHLLYSVEVKSESETALRKLKNDDAFVNSFLKVKPFKKEYGAYSEKAIKRLLAVMRKGFLWNEQDICDETRKRIEIIIKGDVDEKVKERMGHAAYSFDRVSDFQGLPEWLACYVVYGRHSEAMDIQRWDSPERLMAYINNFKQYSLRNPIVEQCILETLRTVHDIWKETGQIDEIHVELGREMKSTSEERARRTQNVLRNENTNLRIKSLLIELKNDTDICNVHPYSPMQQEILRIYEEGALQELNREDEDFEEISKISQMSQPSGKELNRYKLWLEQKYRSPYTGKAISLAKLFTPAYQIEHVIPQSRYFDDSFTNKVICEAEVNTLKSNLLGYEFIKKHGGEIIHCTTLGDVRIFSESEYKAFVMDHYANNKSKKDKLLMEDIPQEFLSRQMNDSRYISKVVKTLLSNIVRMADESEATSKSVIVCTGGVTDRLKKDWGLNDVWNSIVYSRFERLNRLTGTEAFGHWENKDGKRVFQTSMPLELQRGFRKKRIDHRHHAMDALVIACASRNIVNYLNNESANNPKKREDLRRQLCDKNRVIRKPWETFTQDAYNALENVVVSFKNYVRVINKATNRYEHYDENGKKRFVQQKGSELWAIRKPMHKETYYGHVNLRRKELVTLQKALDDIPSICDKKLRDYISALVEKHFNKRQLLAHFKSTDYYWQKQYVNKVYVWTFSDDIKPLVATRKLLDTSFDAKRIGTITDTGIQKILRNYLEAKGGNATLAFTPEGIVEMNQNISKYNDGKPHQPILKVRITEPMGAKYRVGQTENKMAKYVEAQSGTNLYFAIYEDSEGKRSYTTVPLDEVAERLKQRLSPVPEKDENDVPLKFYLSPNDLVYVPTEEELQLRECKLNKDRIYKMVSSTGSECHFIPYYVANVIYNKVEFEAKNKIGRALTGEMIKAVCWKLEIDRLGNILKVIK

SEQ ID NO: 392 - protein, 1375 aa, Prevotella sp. oral taxon 306 str. F0472
MKKILGLDLGTTSIGWALVNESENKDEQSSIVRLGVRVIPLTVDEKGNFEKGKAITTNADRQQVHAARINLQRYKLRRENLRDCLQKQGWIGSEPMCEDGKSSTFETYKLRAKAAVEEVSLHEFARVLFMLNKKRGYKSNRKANDKEEGKLFDGMTIAKKLYEEHLTPAEYSLQLLNTGRKFTPEYYRSDLIEEFEKIWNEQQKYYPEILTDEFKQQLEGKAKSNTSKLFLGKYGIYSADTKGLDRRLQPLKWRVEAMKQQVDKDVLAFVISDLKGQIANTSGLLGAISDRSKELYFSKQTIGQYLWASLQENPHISIKNQPFYRQDYLDEFEKIWETQATYHKELTSELKQEIRDIIIFYQRPLKSKKNLIAVCELEQRKVKVTVDGKEKEITIGPKIAPKSSPMFQEFRIWQNLNNILLLDHETNSKRPLYEEERNLLYEELSVKEKLSKTEALKVLGKKSKQWDLNYKELEGNRTQAVLYDCYNRIIVMSGHEECNFKKLKASDIRHYVKMIFKNLAFNTDILCFDSSLKGHELERQPMCQLWHLLYSYEGDNSRTGNDALLRKLETSFGFPKEYAAVLADVIFEDSYGNLSVKAMRNILPHLQAGKDYSQACEEAGYKHSRRSLTKEELNQKVYKEKLELLPKNSLHNPVVEKILNQMVNVINAVIEEYGKPDEIRIELARDLKIGAAERENMTRSINQGNAENKRIREILEKEFALSYLSRNDIIKYKLYEELKSNGFKTLYSDTYISKDKLFSKDFDIEHIIPKARLFDDSLSNKTIEARDVNIAKSNKTAFDFILERYGEQGVKTYKTKLLRLLEDGAISNKKYNNLLKTEADIPSGFIDRDLRNTQYIAKKAYEILSELVKIVTPTTGSVTNRLREDWQLVDVMKELNFEKYQKLGLADVIEDRDGRKVKRIKDWTKRNDHRHHAMDALTIAFTKPSYIQYLNNLNARSDKSSSIYGIEVKELHREEGKFRFNAPLPINEFRAEAKRHLKSVLVSIKAKKKVMTQNVNKIKTKHGIIKKVQLTPRGELHNATYYGTKKRPLVRMVKVGAALDEATIKRVCSPAIRAALLKRLNAYNGDAKEAFTGRNSIDKNPIYLDIEQTKLVPVLVKTIEWGMYHPIRKRITPDLKIDKVIDKGIREKLKARLAEFNGDAQKAFSNLDENPIYMDEAKRITLKRVSIEGVLSAIPLHTLKDKAGKPVIGSDGKPVFGDYVQTSNNHHIAFYIDDKGNLQDNPVSFFEAAERKSQGVPVIDRRYNCDKGWHFVFTMKQNEYFVFPNEATGFIPSEVDLLDEANYCIISPNLYRVQKLSKASGRDYWFRHHLETMLNDDLRLKNSTFKRIQSLKGLEDIVKVRINSIGKIVAVGKYD

SEQ ID NO: 393 - protein, 1216 aa, Prevotella stercorea DSM 18206
MTKILGIDTGTNSLGWAIVDKTADNYNLLDKGVNIFQEGVKIEKGIESSKAAERTEHRATRVRYYRIKLRKIRLLRILSDNHLCPPLSQEELSTWRLKKVYPKNELFMQWQRTDDDTEKTPYAYRHKCIHEKLDLSDVTDRYILGRAFYHIIQRRGFLSNRKEQGGEDSGKVKEGISTLTHEMNEAGYEYLGDYFYALYNKGEKIRKHYTARNEHFLSEFKAICEKQDLEKELGSEVVRNIEKAIFDQRPLKSQKGQVGKCVFEKNKTKCPSSHPMYEEFRMLTFINNIKIKTPNDDVLRPLNTGEREKIMPLFFRKSKKQFDFEDITKKLAPKKMYGFYKKEEDAEMPFLFNYPMDTSVSGCPVTAALKDVFGDDWITAICETYTLGEGKSRFDIVNDIWHALYFYSDKDKLAEFAINRLQLSEDEAKIFSEISLPADYASLSLKAICKILPYLRRGLIYSHAVFLGNLCEVMPKYEWSIKEMRETIIDNIIMEMDKCDTKDKRTFEVCIKDYLKGQYNVSDNSLKKLYHPSMIETYPRVQYTNEHGVYQLGSPRIDSVRNPMAMRSMFRLRKLVNRLLVEGKIDQNTEVHIEFARELNDANKRNAIALFVKENQSANDEARKQIITLFKKETGTDIEPTDKDILKYVLWEEQNHICLYTGKQIRISDFIGANPKFDIEHTIPRSVGGDSTKMNLTLCDSRFNREVKKTKLPVELPNHDEIMERIKEWKKNYELLDIQIRKNKKLSKGATTKEQKDTIIRKRHLLELRRDYWRGKYERFTMESVPEGFSRRQGTDISVISKYARLYLKSLFNRVYTVKGIATSDFRKIWGIQDIYSKKERINHVHHCIDAIVIACIGLDEYNKLGAYYHDEENNKWYGMSKASFKKPWATFVEDIKKIQDEILVYHYTPDNMPKQGRRRIKIDGKKILCKGDAARGSLHNDTYYGAIENDGAVKYVKRIDLASLEEKDVKNIVDDTVRSIIEAAIKEKGFKDAMASTIWMNEEKRVPIKKVRCFTPSITKPLNIRKQRDVSIKEYKQQYHVANDSNYLLALYIGTDNKGKEKREFEIVNILQAAQYYRTSNDKEVVDRHIVPIKSEHDYPFAYTLKIGTMVLLYEKSPNEVWDATIKERNRRLYKVTGLSTMRMKGRNGEYAYATVKLIHNEEARPSKDIKAKNGEYEQGEEFRPAIIMLHTQLNALVQGYDFEINELGEIRRLR

SEQ ID NO: 394 - protein, 1234 aa, Prevotella tannerae ATCC 51259
MPNFWSIFTENLQTYLMKTRILGLDTGTNSLGWAVVDRDENNQYTPICRGDLIFTEGVKQEKGIEFSLAAERTSYRASRRHYFRRRLRKVEVLKVLVKHKLCPPLSDEALNRWHTKKEYPLDEDFILWQRTNEADNKNPYHDRHICLHRKLNLKDSQTDRYTLGRALYHLTQRRGFLSNRLDQNEEAEETGKVKSAISELSKEMKEAGCEFLGDYFYLLYRTEGNRVRIRSRYTDREKHYLQEFKEICRVQELDEDLAKALEKTIFFQRPLKSQRQGVGKCTMEKGHSRCAVSHPLYEEYRLLCYLNNIRIKTPSDDRLRPLNAEEREKITPLFYKEKNFDFEKIAKKLAGKTPFGWIRDAEDWPYQFNYRMTQEAPACPTTAQLIKVFGEDWKAALAETYTMSAKQDGTLKTEDEICTDIWNVLYSFSSKEKLKEFGLKKLQLDEVQAKAFSEIRLTRDFASLSLKAIRKILFFLRTGEDYSKAIFLANIPTIVGEEIWNDIERRSRLLYKVDLALRPQEERDAEEHRTIAERIKAAVAAEVPDAPIDLLYHPSMIEAYPDAKRNERFDCYQLGSPKTNAVRNPMAMRSLHMVRKVINHLLRKHIIDEKTEIHIEYARELNDANKRQAIADWQRELSKRHTAYAQNIRQLYKAETGLVIEPTKADILKYQLWEEQQHVCLYTGKKIGIADFLGANPKFDIEHTIPRSRGGDSTQENLTLCESKFNRDIKRDKLPTELANYEEILARIEHWKKQCYALKLKRDGIRTHSGLEKSIKDSRIRRRHLVGLEYGYLKGKYDRFTMKEVPEGFSRRQGAGIGLISKYAGLFLKSLFKDPKNPNRSNVYVVKGAITAEFRKLWGLQQADEAKSRENHTHHCIDAYTIACIGPCEYAALAAYYRSDEEFKYGRRREKPQFEKPWPTFTEDLLKLQEELLIVHQTTDKLGKRDRRKVKTPRGKFLTGGDSARGRLHQETYYGAINYDGNIKYVVRKPLDSLTEKDLDKIVDETVMGIVKGAVEAKGSLKEALADGIYMNKEKGILIKRVRIFSDVSEPINLKQLRDVSTKEYKRHIHLRKDENYLFAIYEGIDKKKNKKQTETATVDYLDAAKFYKDSKRRDKANSLVGDYSKKNKLPLKCILKKRQMVLFYEHSPEEIRFKDKKDLSRRLYIVTSIAKDGRVKFLHHQAATATGIQSSPSPFTNDGEHQPYYRLSASNIKVLVAGIDFDINILGEITPKL

SEQ ID NO: 395 - protein, 1487 aa, Prevotella timonensis CRIS 5C-B1
MKNILGLDLGSNSVGWALVKVEENGNPIGSIKMGSRIIPMSQDILGSFEKGDTVSQTAQRTLYRGKRRLIERHVLRRERLCRVLHIMNFLPAHFDRLLGWDKTDNKTYGKFIDDSEPKLAWRQNKNEMGKMEFVFMDSFHEMLSDFAKHQPQLIANGKKVPLDWTIYYLRKKALTQLISKEELAWILLNFNKKRGYYQLRGEEEEEQPTKKEEYKVLKVISVDADEGQKGNGIWYNIHLEDGGIYKKKSDIPLYDWVGKTLQLIVVTTYEKDGKTPKIFDSGKQNPSYRLPKEDDWGLVKKRTESQLQSSGKTVGAFIYDNILSKPDDKIRGNLVRTIERKYYKKELIEILQQQAKYHDELHNQNLLESCAKELYAHNDVHYNEVIKSNMINLLVNDIIFYQRPLKSKKSLIANCKYESYEYVDKETGEIKEMPIKCIAKSNPYYQEFRLWQFIHNLRLSDVVTREDVTAQYLSTPQDYCNLFTYLNDRKEIKQDILLKDFFKIKKVQIDKEKVFPIEWNYIKDATKSYPCNETRYELLSALKRAGMDKQWLDDTPNMQYRLWHLLYSVEEKEESAKALRKLYDDDKFVTSFLKIKPFNKCYGAYSEKAIKRLLTLMRMGKAWNEQAIDAKTLKCIQQIITDNVDSKLKEKIDDSRYVLHHVSDFQGLPTYLASYVIYGRHSEVTDIQCWDSPEDLLKFIRDFKQHSLRNPIVEQVILETLRVVYDIWKAEKHIDEIHVEVAREMKLTAQQRNEANLRNLNNEATNLRIKYLLEELKNDTFIKDVRPLSPIHQEKMRIYEQAVLGNLNKQDKDYDDIIKISKKEHPTNAELIRYKLWLEQRYCSPYTGKAISLSKLFTTAYEIEHIIPQSRYFDNSFNNKVICEAEVNKAKGNMLGYEFIKKQGGQKIYCTQLGKAVTILKEEAYKQFVNEHYAHNKRKRDNLLAENIPESFSSRQLNDTRYITKTIMSLLSNVVRQQSEEEATAKNLLPSSGSVTDRLKNDWGLKDVWNTIVTPRFERLNKLSGTNDFGEMKEENGNRYFQTNVPLEYEKGFKKKRIDHRHHAMDALVIACTTRNMVNYISNANANSPKQREDLRQLLCDKNRIINKPWDTFTQDALKALNDIVVSFKNNVRIINRATNRYQRYDKNGKKIIFSQKGDDMWAIRKSMHKETVFGRVNLIRKEVLPIAKALDNISAICNAQLRAYVNDLVDKHFNKKQLVAHFKSLNYKWNRQDVSKVEVWISSDNKTPMVAVRKPLDTSFDKKKIASITDTGIQTILLNYLESKGGDASVAFAPEGIQEMNSNIELYNNGKAHKPIKNVRLSEPLGAKYQVGERGAKTKKYVEADKGTNLFFAIYEDEEGKRYYYSVPLREAIERQKQKLSPVPEYNEKGVALKFYLSPNDLVYVPTEEERTMGTCHIDKARIYKMVSSTGCSCYFVPSTFAKVIVDKVELQSLNKMEKAITDECIKEVCWKLKVDRLGNIINVIK

SEQ ID NO: 396 - protein, 1218 aa, Prevotella timonensis CRIS 5C-B1
MNKRILGLDTGTNSLGWAVVDWDEHAQSYELIKYGDVIFQEGVKIEKGIESSKAAERSGYKAIRKQYFRRRLRKIQVLKVLVKYHLCPYLSDDDLRQWHLQKQYPKSDELMLWQRTSDEEGKNPYYDRHRCLHEKLDLTVEADRYTLGRALYHLTQRRGFLSNRLDTSADNKEDGVVKSGISQLSTEMEEAGCEYLGDYFYKLYDAQGNKVRIRQRYTDRNKHYQHEFDAICEKQELSSELIEDLQRAIFFQLPLKSQRHGVGRCTFERGKPRCADSHPDYEEFRMLCFVNNIQVKGPHDLELRPLTYEEREKIEPLFFRKSKPNFDFEDIAKALAGKKNYAWIHDKEERAYKFNYRMTQGVPGCPTIAQLKSIFGDDWKTGIAETYTLIQKKNGSKSLQEMVDDVWNVLYSFSSVEKLKEFAHHKLQLDEESAEKFAKIKLSHSFAALSLKAIRKFLPFLRKGMYYTHASFFANIPTIVGKEIWNKEQNRKYIMENVGELVFNYQPKHREVQGTIEMLIKDFLANNFELPAGATDKLYHPSMIETYPNAQRNEFGILQLGSPRTNAIRNPMAMRSLHILRRVVNQLLKESIIDENTEVHVEYARELNDANKRRAIADRQKEQDKQHKKYGDEIRKLYKEETGKDIEPTQTDVLKFQLWEEQNHHCLYTGEQIGITDFIGSNPKFDIEHTIPQSVGGDSTQMNLTLCDNRFNREVKKAKLPTELANHEEILTRIEPWKNKYEQLVKERDKQRTFAGMDKAVKDIRIQKRHKLQMEIDYWRGKYERFTMTEVPEGFSRRQGTGIGLISRYAGLYLKSLFHQADSRNKSNVYVVKGVATAEFRKMWGLQSEYEKKCRDNHSHHCMDAITIACIGKREYDLMAEYYRMEETFKQGRGSKPKFSKPWATFTEDVLNIYKNLLVVHDTPNNMPKHTKKYVQTSIGKVLAQGDTARGSLHLDTYYGAIERDGEIRYVVRRPLSSFTKPEELENIVDETVKRTIKEAIADKNFKQAIAEPIYMNEEKGILIKKVRCFAKSVKQPINIRQHRDLSKKEYKQQYHVMNENNYLLAIYEGLVKNKVVREFEIVSYIEAAKYYKRSQDRNIFSSIVPTHSTKYGLPLKTKLLMGQLVLMFEENPDEIQVDNTKDLVKRLYKVVGIEKDGRIKFKYHQEARKEGLPIFSTPYKNNDDYAPIFRQSINNINILVDGIDFTIDILGKVTLKE

SEQ ID NO: 397 - protein, 1496 aa, Prevotella veroralis F0319
MKTILGLDLGTNSIGWAKVCVDDNGNYLRDIKLGSRIIPMSQDVLGNFDKGVTESQTSVRTGFRGVRRIRERSLLRRERLHRVLHVLGYLPPHYDSAIGWNKNEPSTYGKFLNHGEPKLAWEHKEDGSMRFLFMESFHEMMADFAKSQPSLVSDGKKIPLDWTIYYLRKKALSQPIRKEELAWLLLNFNQKRGYYQLRGEEDDDNPTKCEEYYELKVVGIEADEEGKNGNTWYNVKLENGWIYRRQSKIPLDDWIGKVREFIVTTEYEKDGITLKKDKNGDVKRSFRSPSEDDWGLRKKRTEKLLDSSKMTVGAFVYDHLLAEPSDKIRGKFIRTIERKYYKKELYAILCEQSKYHEELRSGDYLNKCAEELYKNNQPHRNSLLTKDLAYLLLEDLIFYQRPLKTKKSLIAECPYEAYKYVDKETGEIKRQGIKCIAKSNPYYQEFRLWQFISNLRLFNKADDKEVTADYLPTQDDYVRLFAYLNDRKEINQETLLKEFFKLKKITVNSEKVFPIRWNYIEDKEKKYPCNETRHELLLALDRARIDHSWLEKPGQEYRLWHLLYSVESKEETKEALRKLKDDDAFVESFLKVKPFKREYGAYSEKAIKKLLAVMRMGSLWRETDICDTTKGNITKILQGEIDEKLKEKISASVSSYNQLSDFQGLPVWLACYVVYGRHSEAAEIQHWKTPESLLAYINGFKQHSLRNPIVEQCILETLRTVHDIWKEVGHIDEIHVELGRNMKSTADQRARISENVLRNENTNLRIKSLLLELKNDPNIKDVRPYSPMQQEKLRIYEEGVLQELTKDDKDFTEITKISTMAQPSAKELQRYKLWLEQKYRSPYTGKSISLTKLFTSAYQIEHVIPQSRYFDDSFSNKVICESEVNSLKDNMLGYEFIKNHGGEIIHCTMLGDVKVLSESEYKAFVNDHYAHNKRKRENLLLEDIPQEFLNRQMNDSRYISKVVKALLSNIVRAEGEEEATSKFVVSCSGGITDRLKKDWGLNDVWNKIVYPRFERLNRLTGTEAFGQWENKDGKRVFQTAVPLELQRGFNKKRIDHRHHAMDALVIACTSRNIINYLNNESANNPKKREDLRQKLCDKNRTIRKPWETFTQDATAALEDVIVSFKNYVRIINKATNYYERYDVEGKKVIAEQRGDDMWAIRKPMHEATYYGRVNLRRKKKVNLRVALENISSICDNKLRIYINGLVEKGFNTKQILDKFKNTNDHFSMQKIDKVEIWQFTNEEEKLVATRKPLDTSFDTKKIASITDTGIQTILLNYLETKGGDSTIAFTPEGIVEMNQNISKYNNGKEHMPILKVRLYTKLGKKIPVGQTGCKAKQFVIAEAGTNLYFAIYEDEEGKRSYRTIPLNEVVERLKQGLSPVPEKNDKDVHLKFYLSPNDLVYVPIEDEHESLAKDHIYKFVDSSGTTANFIPHRSANVIFELNKKDAEKFCSGSIIQNEYGVGSSQSKNQKAITGEMIKAVCRKLEVDRLGNVIKVI

SEQ ID NO: 398 - protein, 1062 aa, Ralstonia syzygii R24
MAEKQHRWGLDIGTNSIGWAVIALIEGRPAGLVATGSRIFSDGRNPKDGSSLAVERRGPRQMRRRRDRYLRRRDRFMQALINVGLMPGDAAARKALVTENPYVLRQRGLDQALTLPEFGRALFHLNQRRGFQSNRKTDRATAKESGKVKNAIAAFRAGMGNARTVGEALARRLEDGRPVRARMVGQGKDEHYELYIAREWIAQEFDALWASQQRFHAEVLADAARDRLRAILLFQRKLLPVPVGKCFLEPNQPRVAAALPSAQRFRLMQELNHLRVMTLADKRERPLSFQERNDLLAQLVARPKCGFDMLRKIVFGANKEAYRFTIESERRKELKGCDTAAKLAKVNALGTRWQALSLDEQDRLVCLLLDGENDAVLADALREHYGLTDAQIDTLLGLSFEDGHMRLGRSALLRVLDALESGRDEQGLPLSYDKAVVAAGYPAHTADLENGERDALPYYGELLWRYTQDAPTAKNDAERKFGKIANPTVHIGLNQLRKLVNALIQRYGKPAQIVVELARNLKAGLEEKERIKKQQTANLERNERIRQKLQDAGVPDNRENRLRMRLFEELGQGNGLGTPCIYSGRQISLQRLFSNDVQVDHILPFSKTLDDSFANKVLAQHDANRYKGNRGPFEAFGANRDGYAWDDIRARAAVLPRNKRNRFAETAMQDWLHNETDFLARQLTDTAYLSRVARQYLTAICSKDDVYVSPGRLTAMLRAKWGLNRVLDGVMEEQGRPAVKNRDDHRHHAIDAVVIGATDRAMLQQVATLAARAREQDAERLIGDMPTPWPNFLEDVRAAVARCVVSHKPDHGPEGGLHNDTAYGIVAGPFEDGRYRVRHRVSLFDLKPGDLSNVRCDAPLQAELEPIFEQDDARAREVALTALAERYRQRKVWLEELMSVLPIRPRGEDGKTLPDSAPYKAYKGDSNYCYELFINERGRWDGELISTFRANQAAYRRFRNDPARFRRYTAGGRPLLMRLCINDYIAVGTAAERTIFRVVKMSENKITLAEHFEGGTLKQRDADKDDPFKYLTKSPGALRDLGARRIFVDLIGRVLDPGIKGD

SEQ ID NO: 399 - protein, 1066 aa, Rhodopseudomonas palustris
MSERVVRRILGIDLGIASCGWGVVDISGAGGGIIATGVRCFDAPLIDKTGEPKSATRRTARGQRRIVRRRRQRMNGVRRLLCEFGLLPDPRPDALNQAMRRISTASAAAQVTPWTLRAAAHQRLLSNEELAVVLGHIARHRGFRSNAKNEAGANAADETSKMKKAMEATREGLAKYHAFGDMIANDPKFANRKRNRDKDYSHTAKRSDLEDEVRAILRAQLRFGSAAATETLAQTFADVAFFQRPLQDSEDRVGDCPFEPGQKRAARRAPSFELFRFLSRLANLKLAVGRSPERRLTAEEIALAAKGFGETKKTITFKSLREALDLDPNARFSGIGKDKEASLDVVARTGGAAYGTKTLKDALGDAPWRSLSRTPETLDRIAEILSFREDITSIRNGLEDLGLDSLVVEALMQAAANGDFKEFTRAGHISARAARNIIPGLREGLVYSEACARVGYDHAARLSVPLDQVGSPVTRKALSEALKQVRAVAREYGPIDYFHIELARSVGKSAEERKQLTDGIEARNVEKAKRRKQAEEHLGRAPSDDELLRYELAKEQNFKCIYSGDAIDPAGVAANDTRYQVDHILPWSRFGDDSYLNKTLCTARSNQNKRGRTPFEWFEADKTDVEWMEYVARVENLQEVKGRKKRNYSIKDAAAIEDKFKARNLTDTQWATRLLADELSRMFPPRECERAICGRADGGNDGLTIVEERRVFTRPGAITSKLRRAWGLEGLKKQDGKRVEDDRHHAVDALVLAATTESLLQRLTVEVQRREREGRPDDIFHCAEPWRGFRADVRRTVYGSETMPGIFVSRAERRRARGKAHDATIKQIREIEGERLVFERKPVEKLTDKDLEKIPIPKPYGQVSDPKRLRDELVESLRAWIAAGKPKDRPPLSPKGDVIRKVRIQTNDKVSVEINGGTVDRGDMARVDVFRKKNKKAVWEYYVVPIYPHQIVALNDPPDRAVIAYAEDKDWKEIDSSYEFLWSLFGLSYVEISKANGECIDGYFRGLHRGTGAASVCKHISLGKDATVSGIGLKTLASFKKFTIDRLGRKFEIPREVRTWRGEACT

SEQ ID NO: 400 - protein, 1064 aa, Rhodopseudomonas palustris
MSECVTRRILGIDLGIASCGWGVIEVGEASGSIIASGVRCFDAPLIDKTGEPKSATRRTARGQRRIIRRRRQRMNAVRRLLAEFGVLTGRSPDALHQALLRLSQSVAGSQVTPWTLRAAAHERKLTNDELAVVLGHIARHRGFRSNSKNDGGANAADETSKMKKAMETTREGLARYHSFGAMIASDPKFADRKRNRDKDYSHTAKRSDLEDEVRTIFRSQTRFGSLVASEKLSQAFADAAFFQRPLQDSEDMVGSCPFEPGQKRTARRAPSFELFRFLSRLANLKLTVGRAPERRLTPDEIALAAKGFGETKKSITFKSLREALDLDPNARFSGVAKEKESTLDVAARTGGAAYGTKTLKDALGDAPWRSLSRMPEKLDRIAEILSFREDMKAIRNGLEEVGLDGLVVDALMQATANGDFKDFTRAAHISALAARNIIPGLREGLVYSDACTRVGYDHAARPAVPLSQIGSPVTRKALSEALKQVRAVAREYGPIDYFHIELARSIGKSAEERKKLTDGIEARNVEKEKRRKEAAEHLGRAPSDDELLRYELAKEQNFKCIYSGDPIDPAGISANDTRYQVDHILPWSRFGDDSYVNKTLCTARSNQNKRGRTPFEWFDADKTEAEWMEYSARVEDLKEVKGRKKRNYSIKDAASVEDKFKARNLTDTQWATRLLADELKRMFPPRECERVVTVRADGGNDGLSIVEERRVFTRPGAITSKLRRAWGLEGLKKQDGKRVEDDRHHAVDALVLAATTESLLNRLTVEVQQREREGRQDDIFHCSQPWPGFRVDVQRTVYGSETMPGIFVSRAERRRARGKAHDATVKQIRDIDGERIVFERKPIEKLTDKDLERIPVPEPYGKAADPKKLRDELVENLRAWIAAGKPKDKPPRSPKGDIIRKVRIETKDKVAVEINGGTVDRGDMARVDVFRKKNKKGVWEFYVIPIYPHQIVASALPPNRAVIAYKAESEWTAIDGCFEFAWSLNPMSYLELVKSNGELIEGYFRSMDRTTGAINLSPMSTNSETIRSIGVKTLSSFRKFTVDRLGRKFEIPREVRTWRGEACT

SEQ ID NO: 401 - protein, 1173 aa, Rhodospirillum rubrum ATCC 11170
MRPIEPWILGLDIGTDSLGWAVFSCEEKGPPTAKELLGGGVRLFDSGRDAKDHTSRQAERGAFRRARRQTRTWPWRRDRLIALFQAAGLTPPAAETRQIALALRREAVSRPLAPDALWAALLHLAHHRGFRSNRIDKRERAAAKALAKAKPAKATAKATAPAKEADDEAGFWEGAEAALRQRMAASGAPTVGALLADDLDRGQPVRMRYNQSDRDGVVAPTRALIAEELAEIVARQSSAYPGLDWPAVTRLVLDQRPLRSKGAGPCAFLPGEDRALRALPTVQDFIIRQTLANLRLPSTSADEPRPLTDEEHAKALALLSTARFVEWPALRRALGLKRGVKFTAETERNGAKQAARGTAGNLTEAILAPLIPGWSGWDLDRKDRVFSDLWAARQDRSALLALIGDPRGPTRVTEDETAEAVADAIQIVLPTGRASLSAKAARAIAQAMAPGIGYDEAVTLALGLHHSHRPRQERLARLPYYAAALPDVGLDGDPVGPPPAEDDGAAAEAYYGRIGNISVHIALNETRKIVNALLHRHGPILRLVMVETTRELKAGADERKRMIAEQAERERENAEIDVELRKSDRWMANARERRQRVRLARRQNNLCPYTSTPIGHADLLGDAYDIDHVIPLARGGRDSLDNMVLCQSDANKTKGDKTPWEAFHDKPGWIAQRDDFLARLDPQTAKALAWRFADDAGERVARKSAEDEDQGFLPRQLTDTGYIARVALRYLSLVTNEPNAVVATNGRLTGLLRLAWDITPGPAPRDLLPTPRDALRDDTAARRFLDGLTPPPLAKAVEGAVQARLAALGRSRVADAGLADALGLTLASLGGGGKNRADHRHHFIDAAMIAVTTRGLINQINQASGAGRILDLRKWPRTNFEPPYPTFRAEVMKQWDHIHPSIRPAHRDGGSLHAATVFGVRNRPDARVLVQRKPVEKLFLDANAKPLPADKIAEIIDGFASPRMAKRFKALLARYQAAHPEVPPALAALAVARDPAFGPRGMTANTVIAGRSDGDGEDAGLITPFRANPKAAVRTMGNAVYEVWEIQVKGRPRWTHRVLTRFDRTQPAPPPPPENARLVMRLRRGDLVYWPLESGDRLFLVKKMAVDGRLALWPARLATGKATALYAQLSCPNINLNGDQGYCVQSAEGIRKEKIRTTSCTALGRLRLSKKAT

SEQ ID NO: 402 - protein, 1059 aa, Rhodovulum sp. PH10
MGIRFAFDLGTNSIGWAVWRTGPGVFGEDTAASLDGSGVLIFKDGRNPKDGQSLATMRRVPRQSRKRRDRFVLRRRDLLAALRKAGLFPVDVEEGRRLAATDPYHLRAKALDESLTPHEMGRVIFHLNQRRGFRSNRKADRQDREKGKIAEGSKRLAETLAATNCRTLGEFLWSRHRGTPRTRSPTRIRMEGEGAKALYAFYPTREMVRAEFERLWTAQSRFAPDLLTPERHEEIAGILFRQRDLAPPKIGCCTFEPSERRLPRALPSVEARGIYERLAHLRITTGPVSDRGLTRPERDVLASALLAGKSLTFKAVRKTLKILPHALVNFEEAGEKGLDGALTAKLLSKPDHYGAAWHGLSFAEKDTFVGKLLDEADEERLIRRLVTENRLSEDAARRCASIPLADGYGRLGRTANTEILAALVEETDETGTVVTYAEAVRRAGERTGRNWHHSDERDGVILDRLPYYGEILQRHVVPGSGEPEEKNEAARWGRLANPTVHIGLNQLRKVVNRLIAAHGRPDQIVVELARELKLNREQKERLDRENRKNREENERRTAILAEHGQRDTAENKIRLRLFEEQARANAGIALCPYTGRAIGIAELFTSEVEIDHILPVSLTLDDSLANRVLCRREANREKRRQTPFQAFGATPAWNDIVARAAKLPPNKRWRFDPAALERFEREGGFLGRQLNETKYLSRLAKIYLGKICDPDRVYVTPGTLTGLLRARWGLNSILSDSNFKNRSDHRHHAVDAVVIGVLTRGMIQRIAHDAARAEDQDLDRVFRDVPVPFEDFRDHVRERVSTITVAVKPEHGKGGALHEDTSYGLVPDTDPNAALGNLVVRKPIRSLTAGEVDRVRDRALRARLGALAAPFRDESGRVRDAKGLAQALEAFGAENGIRRVRILKPDASVVTIADRRTGVPYRAVAPGENHHVDIVQMRDGSWRGFAASVFEVNRPGWRPEWEVKKLGGKLVMRLHKGDMVELSDKDGQRRVKVVQQIEISANRVRLSPHNDGGKLQDRHADADDPFRWDLATIPLLKDRGCVAVRVDPIGVVTLRRSNV

SEQ ID NO: 403 - protein, 1405 aa, Riemerella anatipestifer
MKTILGLDLGTNSIGWALVKEAENSNEKSEIIKLGVRVNPLTVDEKTNFEAGRPLSTNADRTAKRSARRNLQRYKLRRKNLIDLLIKNQLIDKDTPLTEIGKNTTHQTLELRAKAARERIELEDLARVFLAINKKRGYRSSRKVNNEEEGQAVDGMAVAKKLYDENLTPGQYAYELLSKGKKYVPDFYRSDLQAEFNAIWEYQKQFYADILDDELYNALKGQGQQNSRKRFLAIKGVYTAENKGKRDDVKLRHYKWRSEAISKKINIEEVAYVLVEINNDLNKSSGYLGAISDRSKELYFNKETVGENLWKQIQKNPHTSLKNQVFYRQDYLDEFEQIWETQAQFHPQLTLALKEQIRDVIIFYQRKLKSQKGLLSFCQFESWEIERKDENGNVILNKTTQLPKRQTVGRRVAPKSSPLFQEFKIWQNINNLEVTKISEGASKNKKETETLSDDERKLLFEELNLRGNLSQKEVLQILGLKDKEYKTNFSEGLEGNRTNAALFNIYQQIAENEGYGFDWSKKSAQEIKEELKAVFPQIGIQADILDFNANLDGKEFENQASYQLWHLLYSAEEDDKINEEDQIIYGNSAVSLKKKLCEKFGFTPEYAKWIANVSLQDDYGNLSTKAMRKIIPYLIDGNDYSEACALAGYNHSNSLTKEENDNRELLDKLELLPKNSLRNPVVEKILNQMVNVVNQVIETYGKPDEVRIELARELKKSAEKRAEMTKSINEATRRNEDIKKLITKDFGIPNPTKSDVVRYRLWEELAPLAYKDVFTGKQIKKEDLFSSKIDIEHIIPKALLFDDSFSNKTLVFRETNLKKADRTAYDFIESDYNATLDDYIQRVETLYNNTKGTISKGKRNKLLMAQKNLPDGFIERDLRNSQYIAKKAKAMLYQVFKDVNVTSGSITDRLREDWDLINVMKELNFPKYKALGLTEIEERYDIGQEKTKRVEVITDWTKRNDHRHHAMNALTVAFTTSSHIQYLNYLNARKNESHKEHKNIKGIENKITHKQKDKRKFIPPMPNFREEAKKHIETILVSIKNKNKVYTKNINKTKKKSGHNTKEQLTPRGQLHKETVYGKSKRPMSKPTKINKNFSLEQAQLIINVQEKELVLRHLAQFDNNPAVAFDTKTLKKMPLLKNGEPLKEVLCFEEIFTIRKDITPDLKIEKVVDEKIKAILEQRKKDFGGNAKEAFSDLDKNPIWLNKKKGICIKRVTITGVSNAEALHHQKDHLGREILDDNGNPIPADFVSTGNNHHLAVYLDSEGKLQDNIVSFYEAVVRTSQGLPVVDKGLNKDLGWKFLFSLKQNEMFVFPNDDFDINDFDLLDDKKAELISKHLYRVQKISKVSAGNSFVRDIVFRHHLETTVKEVKELKDISYIQLKSLEGLRNIKKVRINHIGKIVQVGEY

SEQ ID NO: 404 - protein, 1400 aa, Riemerella anatipestifer
MKTILGLDLGTNSIGWALVKETENSNEKSEIIKLGVRVNPLTVDEKTNFEAGRPLSTNADRTAKRSARRNLQRYKLRRKNLIDLLIKHRLIDKDTPLTEIGKNTTHQTLELRAKAARERIELEDLARVFLAINKKRGYRSSRKVNNEEEGQVVDGMAVAKKLYDENLTPGQYAYELLSKGKKYVPDFYRSDLQAEFDSIWEYQKQFYADILDDELYNALKGQGQQNSRKRFLAIKGVYTAENKGKRDEVKLQHYKWRSEAITQKLSIEEVAYVLVEINNDLNKSSGYLGAISDRSKELYFNKETVGENLWKQIQKNPHTSLKNQVFYRQDYLDEFEQIWETQAQFHPQLTLALKEQIRDVVIFYQRKLKSQKGLLSFCQFESWEIERKDENGNVILNKTTQLPKRQTVGRRVAPKSSPLFQEFKIWQNINNLEIAKISDGNSKNKKETEALSDDERKLLFEELNLRGNLSQKEVLQILGLKDKEYKTNFPEGLEGNRTNAALFNIYQQIAENEGYGDWTKKSAQEIKEELKAVFPQIGIQADILDFNAELDGKEFENQASYQLWHLLYSAEEDDKINEEDQIIYGNSAVSLKKKLCEKFGFTPEYAKWIANVSLQDDYGNLSTKAMRKIIPYLIDGNDYSEACALAGYNHSNSLTKEENDNRERLNKLELLPKNSLRNPVVEKILNQMVNVVNQVIETYGKPDEVRIELARELKKSAEERAEMTKGINEATRRNEDIKKLITKNFGIPNPTKNDVVRYRLWEELAPLAYKDVFTGRQIKKEDLFSSKIDIEHIIPKALLFDDSFSNKTLAFRETNLKKADRTAYGFIESDYNATLDDYIQRVETLYNNAKGTISKGKRNKLLMAQKNLPDGFIERDLRNSQYIAKKAKSMIEKVFNDVNVTSGSITDRLREDWDLINVMKELNFPKYKALGLTEIEERYDIGQEKTKKVEVITDWTKRNDHRHHAMDALTVAFTTKSHVQYLNNLNTIHSLKGDEVDLELSKLYGLKNTITEVVNKKRKFIPPMPNFREEAKKHIETILVSIKNKNKVYTKNINKTKKESGYHTKEQLTPRGQLHKETVYGKSKRPMNKPTKINKNFSLEQAQLIINVQEKELVLRHLAQFDNNPAVAFDTKTLKKMPLLKNGEPLKEVLCFEEIFTIRKDITPDLKIEKVVDEKIKAILEQRKKDFGGNAKEAFSDLDKNPIWLNKEKGICIKRVTITGVSNAEALHHQKDHLGREILDDNGNPIPADFVSTGNNHHVAIYEDEKGKLQEKVVSLYEAVARANQGLPVVDKGLNEDLGWKFLFTMKQNEMFVFPNDDFDVNDIDLLDENNAKIISQHLFRVQKLATKNYMFRHHLETNVQEVKELNDIAYKSIRSTEPLKNIKKVRINHIGKIVQVGEY

SEQ ID NO: 405 - protein, 1140 aa, Roseburia intestinalis L1-82
MRENGSDERRRNMDEKMDYRIGLDIGIASVGWAVLQNNSDDEPVRIVDLGVRIFDTAEIPKTGESLAGPRRAARTTRRRLRRRKHRLDRIKWLFENQGLINIDDFLKRYNMAGLPDVYQLRYEALDRKLTDEELAQVLLHIAKHRGFRSTRKAETAAKENGAVLKATDENQKRMQEKGYRTVGEMIYLDEAFRTGCSWSEKGYILTPRNKAENYQHTMLRAMLVEEVKEIFSSQRRLGNEKATEELEEKYLEIMTSQRSFDLGPGMQPDGKPSPYAMEGFSDRVGKCTFLGDQGELRGAKGTYTAEYFVALQKINHTKLVNQDGETRNFTEEERRALTLLLFTQKEVKYAAVRKKLGLPEDILFYNLNYKKAATKEEQQKENQNTEKAKFIGMPYYHDYKKCLEERVKYLTENEVRDLFDEIGMILTCYKNDDSRTERLAKLGLVPIEMEGLLAYTPTKFQHLSMKAMRNIIPFLEKGMTYDKACEEAGYDFKADSKGTKQKLLTGENVNQTINEITNPVVKRSVSQTVKVINAIIRTYGSPQAINIELAREMSKTFEERRKIKGDMEKRQKNNEDVKKQIQELGKLSPTGQDILKYRLWQEQQGICMYSGKTIPLEELFKPGYDIDHILPYSITFDDSFRNKVLVTSQENRQKGNRTPYEYMGNDEQRWNEFETRVKTTIRDYKKQQKLLKKHFSEEERSEFKERNLTDTKYITTVIYNMIRQNLEMAPLNRPEKKKQVRAVNGAITAYLRKRWGLPQKNRETDTHHAMDAVVIACCTDGMIQKISRYTKVRERCYSKGTEFVDAETGEIFRPEDYSRAEWDEIFGVHIPKPWETFRAELDVRMGDDPKGFLDTHSDVALELDYPEYIYENLRPIFVSRMPNHKVTGAAHADTIRSPRHFKDEGIVLTKTALTDLKLDKDGEIDGYYNPQSDLLLYEALKKQLLLYGNDAKKAFAQDFHKPKADGTEGPVVRKVKIQKKQTMGVFVDSGNGIAENGGMVRIDVFRVNGKYYFVPVYTADVVKKVLPNRASTAHKPYGEWKVMEDKDFLFSLYSRDLIHIKSKKDIPIKMVNGGMEGIKETYAYYIGADISAANIQGIAHDSRYKFRGLGIQSLDVLEKCQIDVLGHVSVVRSEKRMGFS

SEQ ID NO: 406 - protein, 1128 aa, Roseburia intestinalis M50/1
MDEKMDYRIGLDIGIASVGWAVLQNNSDDEPVRIVDLGVRIFDTAEIPKTGESLAGPRRAARTTRRRLRRRKHRLDRIKWLFENQGLINIDDFLKRYNMAGLPDVYQLRYEALDRKLTDEELAQVLLHIAKHRGFRSTRKAETAAKENGAVLKATDENQKRMQEKGYRTVGEMIYLDEAFRIGCSWSEKGYILTPRNKAENYQHTMLRAMLVEEVKEIFSSQRRLGNKKATEELEEKYLEIMTSQRSFDLGPGMQPDGKPSPYAMEGFSDRVGKCTFLGDQGELRGAKGTYTAEYFVALQKINHTKLVNQDGETRNFTEEERRALTLLLFTQKEVKYAAVRKKLGLPEDILFYNLNYKKAATKEEQQKENQNTEKAKFIGMPYYHDYKKCLEERVKYLTENEVRDLFDEIGMILTCYKNDDSRTERLAKLGLVPIEMEGLLAYTPTKFQHLSMKAMRNIIPFLEKGMTYDKACEEAGYDFKADSKGTKQKLLTGENVNQTINEITNPVVKRSVSQTVKVINAIIRTYGSPQAINIELAREMSKTFEERRKIKGDMEKRQKNNEDVKKQIQELGKLSPTGQDILKYRLWQEQQGICMYSGKTIPLEELFKPGYDIDHILPYSITFDDSFRNKVLVTSQENRQKGNRTPYEYMGNDEQRWNEFETRVKTTIRDYKKQQKLLKKHFSEEERSEFKERNLTDTKYITTVIYNMIRQNLEMAPLNRPEKKKQVRAVNGAITAYLRKRWGLPQKNRETDTHHAMDAVVIACCTDGMIQKISRYTKVRERCYSKGTEFVDAETGEIFRPEDYSRAEWDEIFGVHIPKPWETFRAELDVRMGDDPKGFLDTHSDVALELDYPEYIYENLRPIFVSRMPNHKVTGAAHADTIRSPRHFKDEGIVLTKTALTDLKLDKDGEIDGYYNPQSDLLLYEALKKQLLLYGNDAKKAFAQDFHKPKADGTEGPVVRKVKIQKKQTMGVFVDSGNGIAENGGMVRIDVFRVNGKYYFVPVYTADVVKKVLPNRASTANKPYSEWRTMEDKDFLFSLYSRDLVHIKSKKGIPIKNVDGSLGESKEVYAYYIGADISGAKIEGKAHDSRYTFRGIGVQKLELIEKCQVDILGHISTVKNEKRMGFS

SEQ ID NO: 407 - protein, 1152 aa, Roseburia inulinivorans DSM 16841
MNAEHGKEGLLIMEENFQYRIGLDIGITSVGWAVLQNNSQDEPVRITDLGVRIFDVAENPKNGDALAAPRRDARTTRRRLRRRRHRLERIKFLLQENGLIEMDSFMERYYKGNLPDVYQLRYEGLDRKLKDEELAQVLIHIAKHRGFRSTRKAETKEKEGGAVLKATTENQKIMQEKGYRTVGEMLYLDEAFHTECLWNEKGYVLTPRNRPDDYKHTILRSMLVEEVHAIFAAQRAHGNQKATEGLEEAYVEIMTSQRSFDMGPGLQPDGKPSPYAMEGFGDRVGKCTFEKDEYRAPKATYTAELFVALQKINHTKLIDEFGTGRFFSEEERKTIIGLLLSSKELKYGTIRKKLNIDPSLKFNSLNYSAKKEGETEEERVLDTEKAKFASMFWTYEYSKCLKDRTEEMPVGEKADLFDRIGEILTAYKNDDSRSSRLKELGLSGEEIDGLLDLSPAKYQRVSLKAMRKMQPYLEDGLIYDKACEAAGYDFRALNDGNKKHLLKGEEINAIVNDITNPVVKRSVSQTIKVINAIIQKYGSPQAVNIELAREMSKNFQDRTNLEKEMKKRQQENERAKQQIIELGKQNPTGQDILKYRLWNDQGGYCLYSGKKIPLEELFDGGYDIDHILPYSITFDDSYRNKVLVTAQENRQKGNRTPYEYFGADEKRWEDYEASVRLLVRDYKKQQKLLKKNFTEEERKEFKERNLNDTKYITRVVYNMIRQNLELEPFNHPEKKKQVWAVNGAVTSYLRKRWGLMQKDRSTDRHHAMDAVVIACCTDGMIHKISRYMQGRELAYSRNFKFPDEETGEILNRDNFTREQWDEKFGVKVPLPWNSFRDELDIRLLNEDPKNFLLTHADVQRELDYPGWMYGEEESPIEEGRYINYIRPLFVSRMPNHKVTGSAHDATIRSARDYETRGVVITKVPLTDLKLNKDNEIEGYYDKDSDRLLYQALVRQLLLHGNDGKKAFAEDFHKPKADGTEGPVVRKVKIEKKQTSGVMVRGGTGIAANGEMVRIDVFRENGKYYFVPVYTADVVRKVLPNRAATHTKPYSEWRVMDDANFVFSLYSRDLIHVKSKKDIKTNLVNGGLLLQKEIFAYYTGADIATASIAGFANDSNFKFRGLGIQSLEIFEKCQVDILGNISVVRHENRQEFH

SEQ ID NO: 408 - protein, 1156 aa, Ruminococcus albus 8
MGNYYLGLDVGIGSIGWAVINIEKKRIEDFNVRIFKSGEIQEKNRNSRASQQCRRSRGLRRLYRRKSHRKLRLKNYLSIIGLTTSEKIDYYYETADNNVIQLRNKGLSEKLTPEEIAACLIHICNNRGYKDFYEVNVEDIEDPDERNEYKEEHDSIVLISNLMNEGGYCTPAEMICNCREFDEPNSVYRKFHNSAASKNHYLITRHMLVKEVDLILENQSKYYGILDDKTIAKIKDIIFAQRDFEIGPGKNERFRRFTGYLDSIGKCQFFKDQERGSRFTVIADIYAFVNVLSQYTYTNNRGESVFDTSFANDLINSALKNGSMDKRELKAIAKSYHIDISDKNSDTSLTKCFKYIKVVKPLFEKYGYDWDKLIENYTDTDNNVLNRIGIVLSQAQTPKRRREKLKALNIGLDDGLINELTKLKLSGTANVSYKYMQGSIEAFCEGDLYGKYQAKFNKEIPDIDENAKPQKLPPFKNEDDCEFFKNPVVFRSINETRKLINAIIDKYGYPAAVNIETADELNKTFEDRAIDTKRNNDNQKENDRIVKEIIECIKCDEVHARHLIEKYKLWEAQEGKCLYSGETITKEDMLRDKDKLFEVDHIVPYSLILDNTINNKALVYAEENQKKGQRTPLMYMNEAQAADYRVRVNTMFKSKKCSKKKYQYLMLPDLNDQELLGGWRSRNLNDTRYICKYLVNYLRKNLRFDRSYESSDEDDLKIRDHYRVFPVKSRFTSMFRRWWLNEKTWGRYDKAELKKLTYLDHAADAIIIANCRPEYVVLAGEKLKLNKMYHQAGKRITPEYEQSKKACIDNLYKLFRMDRRTAEKLLSGHGRLTPIIPNLSEEVDKRLWDKNIYEQFWKDDKDKKSCEELYRENVASLYKGDPKFASSLSMPVISLKPDHKYRGTITGEEAIRVKEIDGKLIKLKRKSISEITAESINSIYTDDKILIDSLKTIFEQADYKDVGDYLKKTNQHFFTTSSGKRVNKVTVIEKVPSRWLRKEIDDNNFSLLNDSSYYCIELYKDSKGDNNLQGIAMSDIVHDRKTKKLYLKPDFNYPDDYYTHVMYIFPGDYLRIKSTSKKSGEQLKFEGYFISVKNVNENSFRFISDNKPCAKDKRVSITKKDIVIKLAVDLMGKVQGENNGKGISCGEPLSLLKEKN

SEQ ID NO: 409 - protein, 1341 aa, Ruminococcus lactaris ATCC 29176
MGKGYYVGLDMGTGSVGWAVTDESYQILRRHGKAMWGVRLFESAKTAEERRMFRTGRRRLDRRGWRIEILQEIFAEEISRVDPGFFLRMKESKYYPEDKRDIQGNCPELPYTLFVDKTFTDKDFHKKYPTIYHLRKMLMETEDTPDMRLVYLALHHMMKHRGHFLLSGDISQVTEFKNTFNQFIENIRNEEMDFEIELDESAVQMIEETLKDKNLTRSAKKSKLVKGLNAKNVRDKAFLTLLSGGTVKLSDLFGMEELNEGERPKISFADNGYEEYAAVVEMELGELYYIVESAKAVYDWAILSDILGGSTSVSDAKVRAYEKHKADLKYLKAVVKEYFPKEVYNAVFVESSDKLNNYPAYIGMTKKNGKKVSLEGKRCSREEFMDFLKKNIVVKLPDEEAKMYLQSELEKDSFLPKQVNKDNGVIPYQVHKYELKKILDNLGDKIPFLKENAEKIEKLFSFRIPYYVGPLRTGNGENSKFAWAERKSTEKIYPWNFENVIDVEQSAENFIRRMTNKCTYLIGEDVLPKDSLLYSKFMVLNELNNLRLDGQKISVELKQKIYRDVFCRSRKVTQKKLKSYLIREGIAGKNVELTGIDGDFKGSLTAYHDFKEKLIDVELTQKEKEEIILNIVLFGDDKKLLKQRLKKKFPQLTEKQINTVTALSYKGWGRLSKKLLEEVTVPAPETGEVWNIITALWETNDNFMQLLSKEYQFSDRIEEFNEEKADPEVSYQTIEDLYVSPAVKRQIWQTLQIIQEIEKVMGEKPKRVFVEMAREKQENKRTESRKKTLSDLYTKCKKEEPEWIEALCTSLEKHEEHQLRSDKLYLYYTQKGRCMYSGEPIDLEDLWDNTKYDIDHIYPQSKTMDDSLKNRVLVKKEYNAKKSDTYPIAADIQKKMMPFWKSLLTGGFIPKEKYDRLVRNNPLDANELAGFIERQIVETRQSTKAVAEILKKILPDTEIVYVKAKTVSKFRQDFDFIKVRDMNDLHHAKDAYLNIVVGNVYFVKFTKNAAWFVKENPGRTYNLEKMFIWDVARDGEIAWKAGKSGSIVQVRAMMEKNHILVTRRSYEVKGGLFDQQILKKGKGQVPVKESDERLRDIGKYGGYNKAAGVYFMLVSSKDKKGKEQRTIEFVPIYLKDRVEKDMESARNYLMEERGLREPKILIKKIKIDTLFKVDGFYMWLSGRTSNQLIFKGANQLILSKEDMKTLKKVVKYIQRQKEDKNVKISMRDGITEEELLKLYETFLDKIRHSIYGARLSSQEKTLVNGKEKFIDLSVEAKCQVLYEILHLFQCQSGAANLKMIGGPASAGILVMNNNISKCKNISIVNQSPTGIYEKEIDLLRV

SEQ ID NO: 410 - protein, 1471 aa, Scardovia wiggsiae F0424
MGYKAPRNDKGEIDYGVGLDLGNGSVGWVAMDKDYHLIRARGHELIGARLFDPANSAENRRESRTTRRRLSRRRWRLRMLDSLFASELAKIDPNFLARRKYSWVHPKDEQNHENWYGSIIFGSKEQDKQFYKDYPTIYHLRKKLTEDTERHDIREIYVAIHHIVKYRGHFLREGEINSENLFDPEGFVELIKDVIKLNNSYDESTPIFEASPADVSEALLNEHTSRSGRIEDTLDKLDFSVSRVDKHELKGMRDAAKAVIGAIVGNTADFSKIFNLDNLDKDSKDNLKLKFADSNFDEKYGGVVGSGLLDETQIELVDRIHAVYDAVALKGILGDAHTISEAKVESYEKHRKNWKLIKEELRTKENKDEVDLWYGDLSGRQYKNPPDPEKGPDEGSKKDSPIRDSDQKQNLIKKANDYFTELIDDSQLSEEQKNCLKNDINNGQLFPVQRSSDNGVIPYQIHLNELRRIIENQKQYYPFLAETFIRKTAEGKSYEENKIVALLKFRVPYYVGPLVSKEDMEEHSSGNSAYHWMARNPGRGEAITPWNFDEVVDKDESGARFISRLTGTDTYLLGEPTLPQHSLLYEEYMVLSELNNVRLNVRQGNHWSDKNRQRLSYKQKEFLIENLFKEHKTVTRKRAEDCLSSMGCGEVQLFGLSDEKKFASSLSSYITLKKILGKAFVDDSGNSAILERIIEVQTVFEDREPLTHQLSLIDSLTVEQRKQLAKIHYTGWGKLSRKLLTSKKGSYKIHSQNEIMRTQHSIIDIMRGDSLNLIEIIRDKKIGIGEWIDNENLDRETGESDVSRLESVFEGIVMSPRVKRGVVQAVRVIDDLAKAIGNPPQRIFIEMADEVQASQRTVSRLSRLKALYGSPSLQKEFNDLKDLRKSLNETKDADLQEDRLYLYYIQLGKDLYTGKEISIDSLSSAYDIDHIVPQALTQDDSIDNRVLVSRKENARKTDSYLYTPDLIKNMRPLWGKLLAAGLMSQKKYDALTRVDDFKDREKQRFVQRSLVETRQIMKNVSTILRTYYGEDTNVVTLKSSITHDMRKYLGFPYKNRDINDYHHAQDALCISAAGQFMLNRHFVSGGEVTDGASNAYNMYLAEYLQEFRDAKARGERKRSTAFGFVVGSMSSKDDEKRTDHRTGEIVWSETNAEYLRKVMNYKKMLITQKVGDVKTRALYDETRYGHKESSAKSIKFDNLRRDTSLYGGFSGASTAYMMLVEYKKKNKLVSITAQEASLLAVADQKNDTVSVMDGILASHGLSGAKILLPKIVTGQLLDYSDALVTLQSASELNTARQMWLPRNDYNDIDIILKSKDIEDAAHKLGYDSDTVHVLRRIQKLFEAVFRVAESQFPLHQLSKDQQEEILRDPQNYGFGSAVKLLGGLLKALHANAENTNLAGLVKVLHGDKEYSDDGKAKEFKKFGFSPRWRRISNPTGFTLSDSDTFIYQSPSGIFEQRVTVKELKEKADKQK

SEQ ID NO: 411 - protein, 1178 aa, Scardovia inopinata F0304
MGKRHNSNMAKKKISYRIGIDVGLNSTGLAAIEVDDDGAPIRILNTMSVIHDGGVDPDAAKVRGTRLAISGIARRTRRMRRRRAKRLDRLEQILEKYGYTDTEPVLEEPYGPWICRAELADGFINDDEQRRMMIGIAIRHIARHRGWRNPYQNVRALLNIDDSDLSEEYKNLKEKVQDQINDGKDLPNFTPSQLVRDYLDNFSGQPAARIRTGKAGPRGNRRDAVGILPQRMRQSDYAYELQRIFDMQKIGRDEAQELLMAVFEAKSPKGSAEKRIGKDPLTGKKRALKASLAFQKYRIVATITNLRIKTGTGSERMLSPTELNDIYTYLLRVQDDNHLPTWEDICEEVLHIGRYQLAGIGKTFEGGERISNMPPVIQTSLAIHGLSEGTLAEKLTKWWDKADDDSRESMIKLLSNTVDIDRVNEVDENFASALDFIDSLDDEELTKLDKIALPRGRAAYSEEALNKLTADMLNTGDDLFSARQRIYHVNNSWRPPQPPIGEPLGNPAVDRVLKITNRYLMNCLNRWGQPRRVTIEHTRSGFTSVKQATEHQKISDKRAEYRRDIVKQLEEAGVESVHEYDIRRWEAVQRQNGQCLYCGRDITFKTCEMDHIVPRKGPGSTNTRTNFAAVCPECNRMKSNIPFASWAETKEAKDRGVSLDKAIKQVRFFNFTKNEYSPQAQRNFKKSMIERLKQKTSDEPLDNRSIESVSWMADELYKRIDWYFNHEQYETSKKAINDDKDNLSGTQVVVYPGSITAEARNAAGLGGNIHFIGGRYKTRLDRRHHAVDACVIAMMEPGIARILTERNQLRQAQRLTARIEDDEVNWKDYPTENTAGYNKYQAWSDRMHALLEYMNNALDYDKIPVVRWERLQLGNRSAHEDTIHPLKKLPLSHEISAIDINHASTPALYEALVSLPDFSEQDGLPADPSRQINVNGERYSGDDLVSFFNSNAAQIAIQGGSAELGTAFHHARIYRCWTVGKNGKKKIFFGMIRVYQHDLLHAKNEDLFTYPLKRSSVSMRYAKKEVVHAILSGNAEYVGYLCVGDELVLDLKGDKSNDEGGSRLSGQVGEFVQKFEEDSKVNSQIVNRWTVDGFPDEAKLRLRPSMFAGEGLKNMKSELVENAAIKNILSKTGWRVSVDVISKKSPVVLRRNAFGEPRWKTNAGLPVSYRWQDTETKE

SEQ ID NO: 412 - protein, 1063 aa, Simonsiella muelleri ATCC 29453
MEKFHYVLGLDLGIASVGWAAIEIDKETETSIGLLDCGVRTFERAEVPKTGDSLAKARREARSTRRLIRRRSHRLLRLKRLLKREIFRQPETFKDLPINAWQLRVKGLDSRLNEYEWAAVLLHLVKHRGYLSQRKSEMSETDSKSEMGRLLAGVAENHQLLQQEQYRTPAELALKKFVKHFRNKGGDYAHTFNRLDLQAELHLLFQKQRELGNPFTSPELERQVDDLLMTQRSALQGDAILKMLGHCGFEPEQFKAAKNTFSAERFIWLTKLNNLRIQDQGKERALTADERTKLLDEPYKKSKLTYAQVRKLLSLPQTAIFKGLRYDLEHDKKAENSTLMEMKSYHNIRQTLEKSGLKTEWQSIATQPEILDAIGTAFSIYKTDEDISHELKTCRLPENVLNELLKNINFDGFIQLSLTALRKILPLMEQGYRYDEACTQIYGNHHSGSLQQESKQFLPHIPIDDVRNPVVFRTLTQARKVVNAIIRRYGSPARVHIEMARELGKSKSDRDRIEKQQQKNKKERENAVAKFKEDFPDFVGEPRGKDILKMRLYEQQHGKCLYSGHDIDINRLNEKGYVEIDHALPFSRTWDDSQNNKVLVLGSENQNKRNQTPDEYLDGANNSQRWLEFQARVQTCHFSYGKKQRIQLAKLDDETEKGFLERNLNDTRYIARFMCQFVQENLYLTGKGKRLVFASNGGMTATLRNLWGLRKVREDNDRHHALDAIVVACSTASMQQKITKAFQRHESIEYVDTETGEVKFRIPQPWDFFRQEVMIRVFSDQPCEDLVEKLSARPEALHDNVTPLFVSRAPNRKMSGQGHLETIKSAKRLSEENSMVKKPLTTLKLKDIPEIVGYPSREPQLYAALKTRLETHDDDPIKAFAKPFYKPNKNGELGALVRSVRVKGVQNTGVMVHDGKGIADNATMVRVDVYTKAGKNYLVPVYVWQVAQGILPNRAVTSGKSEADWDLIDESFEFKFSLSRGDLVEMISNKGRIFGYYNGLDRANGSIGIREHDLEKSKGKDGVHRVGVKTATAFNKYHVDPLGKEIHRCSSEPRPTLKIKSKK

SEQ ID NO: 413 - protein, 1327 aa, Solobacterium moorei F0204
MEGQMKNNGNNLQQGNYYLGLDVGTSSVGWAVTDTDYNVLKFRGKSMWGARLFDEASTAEERRTHRGNRRRLARRKYRLLLLEQLFEKEIRKIDDNFFVRLHESNLWADDKSKPSKFLLFNDTNFTDKDYLKKYPTIYHLRSDLIHNSTEHDIRLVFLALHHLIKYRGHFIYDNSANGDVKTLDEAVSDFEEYLNENDIEFNIENKKEFINVLSDKHLTKKEKKISLKKLYGDITDSENINISVLIEMLSGSSISLSNLFKDIEFDGKQNLSLDSDIEETLNDVVDILGDNIDLLIHAKEVYDIAVLTSSLGKHKYLCDAKVELFEKNKKDLMILKKYIKKNHPEDYKKIFSSPTEKKNYAAYSQTNSKNVCSQEEFCLFIKPYIRDMVKSENEDEVRIAKEVEDKSFLTKLKGTNNSVVPYQIHERELNQILKNIVAYLPFMNDEQEDISVVDKIKLIFKFKIPYYVGPLNTKSTRSWVYRSDEKIYPWNFSNVIDLDKTAHEFMNRLIGRCTYTNDPVLPMDSLLYSKYNVLNEINPIKVNGKAIPVEVKQAIYTDLFENSKKKVTRKSIYIYLLKNGYIEKEDIVSGIDIEIKSKLKSHHDFTQIVQENKCTPEEIERIIKGILVYSDDKSMLRRWLKNNIKGLSENDVKYLAKLNYKEWGRLSKTLLTDIYTINPEDGEACSILDIMWNTNATLMEILSNEKYQFKQNIENYKAENYDEKQNLHEELDDMYISPAARRSIWQALRIVDEIVDIKKSAPKKIFIEMAREKKSAMKKKRTESRKDTLLELYKSCKSQADGFYDEELFEKLSNESNSRLRRDQLYLYYTQMGRSMYTGKRIDFDKLINDKNTYDIDHIYPRSKIKDDSITNRVLVEKDINGEKTDIYPISEDIRQKMQPFWKILKEKGLINEEKYKRLTRNYELTDEELSSFVARQLVETQQSTKALATLLKKEYPSAKIVYSKAGNVSEFRNRKDKELPKFREINDLHHAKDAYLNIVVGNVYDTKFTEKFFNNIRNENYSLKRVFDFSVPGAWDAKGSTFNTIKKYMAKNNPIIAFAPYEVKGELFDQQIVPKGKGQFPIKQGKDIEKYGGYNKLSSAFLFAVEYKGKKARERSLETVYIKDVELYLQDPIKYCESVLGLKEPQIIKPKILMGSLFSINNKKLVVTGRSGKQYVCHHIYQLSINDEDSQYLKNIAKYLQEEPDGNIERQNILNITSVNNIKLFDVLCTKFNSNTYEIILNSLKNDVNEGREKFSELDILEQCNILLQLLKAFKCNRESSNLEKLNNKKQAGVIVIPHLFTKCSVFKVIHQSITGLFEKEMDLLK

SEQ ID NO: 414 - protein, 1179 aa, Sphaerochaeta globosa
MSKKVSRRYEEQAQEICQRLGSRPYSIGLDLGVGSIGVAVAAYDPIKKQPSDLVFVSSRIFIPSTGAAERRQKRGQRNSLRHRANRLKFLWKLLAERNLMLSYSEQDVPDPARLRFEDAVVRANPYELRLKGLNEQLTLSELGYALYHIANHRGSSSVRTFLDEEKSSDDKKLEEQQAMTEQLAKEKGISTFIEVLTAFNTNGLIGYRNSESVKSKGVPVPTRDIISNEIDVLLQTQKQFYQEILSDEYCDRIVSAILFENEKIVPEAGCCPYFPDEKKLPRCHFLNEERRLWEAINNARIKMPMQEGAAKRYQSASFSDEQRHILFHIARSGTDITPKLVQKEFPALKTSIIVLQGKEKAIQKIAGFRFRRLEEKSFWKRLSEEQKDDFFSAWTNTPDDKRLSKYLMKHLLLTENEVVDALKTVSLIGDYGPIGKTATQLLMKHLEDGLTYTEALERGMETGEFQELSVWEQQSLLPYYGQILTGSTQALMGKYWHSAFKEKRDSEGFFKPNTNSDEEKYGRIANPVVHQTLNELRKLMNELITILGAKPQEITVELARELKVGAEKREDIIKQQTKQEKEAVLAYSKYCEPNNLDKRYIERFRLLEDQAFVCPYCLEHISVADIAAGRADVDHIFPRDDTADNSYGNKVVAHRQCNDIKGKRTPYAAFSNTSAWGPIMHYLDETPGMWRKRRKFETNEEEYAKYLQSKGFVSRFESDNSYIAKAAKEYLRCLFNPNNVTAVGSLKGMETSILRKAWNLQGIDDLLGSRHWSKDADTSPTMRKNRDDNRHHGLDAIVALYCSRSLVQMINTMSEQGKRAVEIEAMIPIPGYASEPNLSFEAQRELFRKKILEFMDLHAFVSMKTDNDANGALLKDTVYSILGADTQGEDLVFVVKKKIKDIGVKIGDYEEVASAIRGRITDKQPKWYPMEMKDKIEQLQSKNEAALQKYKESLVQAAAVLEESNRKLIESGKKPIQLSEKTISKKALELVGGYYYLISNNKRTKTFVVKEPSNEVKGFAFDTGSNLCLDFYHDAQGKLCGEIIRKIQAMNPSYKPAYMKQGYSLYVRLYQGDVCELRASDLTEAESNLAKTTHVRLPNAKPGRTFVIIITFTEMGSGYQIYFSNLAKSKKGQDTSFTLTTIKNYDVRKVQLSSAGLVRYVSPLLVDKIEKDEVALCGE

SEQ ID NO: 415 - protein, 1426 aa, Sphingobacterium spiritivorum ATCC 33861
MKHILGLDLGTNSIGWALIKQDFENKQGEILGMGSRIIPMSQDILGDFGKGNSVSQTAERTKYRSVRRLRERFLLRRERLHRILNVLGFLPEHYASQIDFTKRFGKFKEETEPKLVYSNEGFIFKKSFEEMLSDFKTHQPQLLEDNKKIPYDWTIYYLRKKALSRKIEKEELAWILLNFNQKRGYYQLRGEEEEENPNKLIEFYSLKIVDVLADEPQKGKSDIWYSLILENGWIYRRSSKTPLFDWKEKTRDFIVTIDLNDDGSVKTDKEGNEKRSFRAPGENDWTLVKKKTEQEIDSSRKTVGTYIYETLLKNPKQKIKGKLVRTIERKFYKTELKQILEKQKEFHPELRQDDLYSDCVRELYKNNEAHQLTLSKKDFVHLFMEDIIFYQRPLGSQKSSISNCTLEFRKYKDENGTEHTQYLKAIPKSNPYYQEFRIWQWMYNLNIYKKEDDTNVTKDFLNTKADFESLFEFLNNRKEVDQKALLKHFKLNDKTHRWNYVEDKKYPCNETKTMILSRLDKVENISDDFLTREMEQKIWHIIYSVNDKVEYEKALKSFAGKNNLEDNSFFEAFKKFPPFKSEYGAFSEKAIKKLLPLMRMGKFWNYNNISEQSKSRIQKIITGEYDENIKDKVREKAIHLTTETDFQGLQLWLVQYIVYGRHSEAAMLGKWNSADDLEEFLKEFKQHSLRNPIVEQVITETLRVVKDIWQKYGNGAKDFFREIHIELGREMKLPAEERERLTRQISENENTNFRIKALLAEMMDDNSVENVRPFSPMQQEILKIYEEGVLNSDIEIEDDILKISKTAQPSSSDLKRYKLWLEQKYKSPYTGQIIPLNKLFTPEYEIEHIIPQSRYFDDSFTNKIICESAVNKLKDNYIGLEFIKKLGGSIVECGNGKSVAILKHDAYEDFIKKHYANNRSKRNKLLLEDIPEKMIERQMNDTRYISKYISGVLSNIVRVEDGTDEGVNSKNIVPGNGKITTQLKQDWGLNDVWNDLILPRFERMNHLTNSTDFTAWNENHQKFLPTVPVEFSKGFSKKRIDHRHHALDALVIACATKDHVNLLNNQSAKSDTKRYDLKKKLMKFEKVAYNHPQTGERIEREAPKQFLKPWETFTIDAKNHLETIIVSFKQNLRVINKATNYYEKYVEKEGTKVKERVEQKGTNWAIRKPMHKETVSGKIDLPRIKVPKGKILTATRKSLDTSFNLKTIGSITDTGIQKILKNYLQYKDNNPELAFSPEGIEDMNKNIEKFNNGKAHQSISKVRVFELGSKFPLGQSGNKKEKYVEAAKGTNLFFAIYQDKNGKRSYETIPLNEVIERQKQGLSVVDLKGVDDFYLSPNDLVYVPSEDELENISMIDFNKMSSERIYKVVSFTGNQIFFVRQDIATSVVNKAEFSTLNKMERAIDGTMIKETCVKLQIDRLGNISKI

SEQ ID NO: 416 - protein, 1110 aa, Sphingobium sp. AP49
MAEGKKRIWRLGADLGANSLGWAAIELSAPVNGKPIAILAAGSRIFSDGRDPKSGASLAVDRRDARAMRRRRDRFKQRQKALIKYLIADGLFPADEAARNAMAAIDPYAVRARALDEALSLPELGRALFHLNQRRGFKSNRKADRKADDDAGKIAIGIDRTRDAIAEDEADAGAEPGSWTFGKWLHERRLKGQSVRTRLRPESGEDAKGDGYDFYPDRALMEEEFDAIWAAQAPHHPDVLTNDVHDRLHEIIFYQRPLKAPQVGMCSLIPGDRRLPKAHPLFQRRRLLEELNALMIVRPGEVAQRLTREERDILLLKLKDKNKVSFATLRKALKLDPDARFNKESEDRTDLKGDEVAAVMGSKTRFGNLWVHLSIEAQWDVLARLDAVESDAEDAAFCAWLVETYALTPEQARAVANAPLPPGYGRFGETATRKLIEALRDGKKDDRVLVYSEAVTEAGLGHHSDRRTGEVFEDAKGRPQLPYYGVALERHIMPGTGDPSDPEEMRVGRLTNPTVHIGLNQLRRILNVLIRAYGPPAEIAIELARELKLTDEDKKRINRENNDNRIAAERRSEKLLAIGQADSGANRALLKLWEELNPANVLDRRCIYSGRQISIDMLFSAAVEVDHILPFAATLDDSNGNKIVCLREANREKRKRSPHDAWGHSARWDEIAARAAQLPRNKRWRFEPDAMDKFRDEGGFQARHLVDTQYLARLSREYLATLYPEKGEGSGHIWVSPGRLTEMVRRKLGLNDLLPDHNFGGGADQAKNRLDHRHHAIDAVVVAIVDRGMLNAIARASGQEGAEGRERIIIPEPWDGFRDALRETVNRITVSHRTDHGTASKAGLPKGKDATAGRLHNDTAYGFTGDTDAKGNSIVVRRVPLSSFKKLADLDRIRDADLKAALYQHLNGLEGKAFEKALAEFHKLEWHNFGGVRRVRVTEPLTVIPIKDRNGRIYKGYKGDSNYRYDVWELPDGKWVTNWKNEAGEAMSSVISMFDAHQSSEPPRPHPAARKILSLHQNDLLAIEREGEDRKLMRVVKFGQSGQITLAEHQQAGDLKKRDAVSNDDDPFKYFAPTSGGLKKVKARQVRIDEIGRVLDPGFPARTARRKTRG

SEQ ID NO: 417 - protein, 1090 aa, Sphingomonas sp. S17
MDWRLGLDLGANSLGWAALRLDRAGDPIGILAMGSRIFSDGRDPKSGASLAVDRRAARAMRRRRDRFKQRQAALLKYLIRDGLFPADQADRQRLADEDPYALRARALDEELSLFEIGRALFHLNQRRGFQSNRKADRGQDDEAGKIAVGVDRLNQQMEEQGARTLGEFLHQRRRAATDANHIPSVRTRLRPETGEGAKGDGYDFYPSRALIAEEFEEIWAAQAPHYPDTLTQQVHDRLYEIIFHQRPLRAPQVGQCTLVAGETRLPKAHPLFQKRRLLEEINALMIVRPGEIAQRLTPEERDTLYLKLKDKRTVSFATLRKTLKLDSAARFNKESENRTELKGDEVAAELGAKTRLGTRWQHLSGDQQWEVVHRLMALESQADEAAFRDWISQTYDLLPEQAAAVLGARLPQGHGRFGPTATTTLIDSLLHDRTEDGRVVVYSEAVQRSGLGHHSDLRHDRDDEDVTELPYYGVALERHIMPGTAEPTDPEEMRIGRLTNPTVHIGLNQLRHVVNRLIRAYGPPKEIAIELARELKLSEDEKKKRNSENRDNRLAAEGRSKKLEEIRQRDTGANRALLKLWEELNPGNVLDRRCIYTGEQISIDMLFSDRVEVDHILPFAQTLDDSNGNKLLCLREANREKRRRSPYEAWGHTDRWPDIAERASRLPKPKRWRFEPDAMQRFATEDGFLARHLVDTQYLGRLAREYLSWLYPGRGEGSGHVWVSPGRLTEMVRRKLGLNDLLPDHNFGGGADQPKNRLDHRHHAIDALVVAIVDRGMLQAIARASGQDGSEGRERIHIPAPWDGFRDDLRVAVNGIIVSHRPDHGTVAKAGLARGRDQTAGRLHNDTAYGLTGETDAKGNSIVVRRIPLSAIKKPADIARVRDPLLRNALAEFTKGLDGKAFEARIGRFHELGPLLYRGIRRVRVVETLTVIPIRDAEGRAYKGYKGDSNYRYDVWEMPDGKWRCQVVSMFDAHQSTEQARPHPAARKILSLQRNDILAIERTEGDRELVRVVKFSEKQFAVAPPHEGGSLKTRDGNADDPFRYLYPSPNTLKGWRARQVRIDELGRVLDPGFPARKSVRRTRPRAAPVD

SEQ ID NO: 418 - protein, 1084 aa, Sporolactobacillus vineae DSM 21990 = SL153
MKYSIGLDIGISSVGWSVINLDRERIELMGARLFDAAENPKNGSSLAAPRRDARSARRRLRRRRYRVGRVRHFIIDRGLVTRGQADQLFDWKDGDLDIWLVRVNALERLLTDREFARVLIHIAKNRGYRSNRKSEAKSGENGQVLSAIKANKELMEEKGYQTVAEMLVNEPETFAGRKRNRGGEYTHVIARSELEHEIRLIFTKQRAFGNRFATEENENTYVKIWAAQRPVATKDDILKKIGDCTFEKGEKRAPKASYAFQYFRALDKLNRLRILSVREPSRNLTDDERNLIVPALFNHDKQKYSDLRKILQLRDDQKFNELFYDPGKSLKENENKTFLSLAEQYKIRKVIRDVQGKDGLLQYRPLDIDTIAYALTVFKDDQDTRDYLSNTFVNGNGKQVLNLANRAFDAELIDGLLSLSFAKFGHLSLKALHKLIPHMEQGLSYYDACKKVGYHDNEQVGKSKQHLLPVIPADEIRNPVVVRSLSQTRKVINAIIKRYGSPTFMYIELAREMGRPYNERRDLEKQYNKNRTVNDSAIEQIHELYPEIGAPRGHDILKYKLWQQQDCKCAYSLEKIPAEKIFEPGYAEVDHIIPYSRSFDDSNSNKVLVLSRMNQEKKNRTPYEWFGGDEHRWNKFESYVNALKVNRKKKSLLTKKNMDTEEEDTFKSRHLNDTRYITRFIKSFVEDNLLFREIEGAKQHVFTVNGAYTSLMRKRWGFNKNREESDLHHSVDAVIIAVSQPFRNEVSRYFKHREISLPQLLKRTWDYFPEPWEGFVKELRARTLQDPEKLKLALESLDLDSYDPEFIDEVKPIFISRMPKRSIKGQIHDETLRRNRGKTKDGFVKIVTRTRLENIKFDKNGDFPMYGRESDPKTYQAIKQRYLENNKDKKKAFIEPLYKPAKNPNNASLIRSVKIEDKANQIVPLRDEAVAYNASIVRTEVYRNKETGKFYLAPVYVSDVFAGREPRRFIRANVPYEQWVNITDKFTFLFNLYPNDVIYIKMKKVKTTKSNINKTISWQESYFYFKGTDIHTGAITIIDHMNSFTDRVGTQGLQLFEKYQVDPLGNLSRVHGETQYGVPALSHS

SEQ ID NO: 419 - protein, 1053 aa, Staphylococcus aureus subsp. aureus; identical to SEQ ID NO: 24

SEQ ID NO: 420 - protein, 1054 aa, Staphylococcus lugdunensis M23590
MNQKFILGLDIGITSVGYGLIDYETKNIIDAGVRLFPEANVENNEGRRSKRGSRRLKRRRIHRLERVKKLLEDYNLLDQSQIPQSTNPYAIRVKGLSEALSKDELVIALLHIAKRRGIHKIDVIDSNDDVGNELSTKEQLNKNSKLLKDKFVCQIQLERMNEGQVRGEKNRFKTADIIKEIIQLLNVQKNFHQLDENFINKYIELVEMRREYFEGPGKGSPYGWEGDPKAWYETLMGHCTYFPDELRSVKYAYSADLFNALNDLNNLVIQRDGLSKLEYHEKYHIIENVFKQKKKPTLKQIANEINVNPEDIKGYRITKSGKPQFTEFKLYHDLKSVLFDQSILENEDVLDQIAEILTIYQDKDSIKSKLTELDILLNEEDKENIAQLTGYTGTHRLSLKCIRLVLEEQWYSSRNQMEIFTHLNIKPKKINLTAANKIPKAMIDEFILSPVVKRTFGQAINLINKIIEKYGVPEDIIIELARENNSKDKQKFINEMQKKNENTRKRINEIIGKYGNQNAKRLVEKIRLHDEQEGKCLYSLESIPLEDLLNNPNHYEVDHIIPRSVSFDNSYHNKVLVKQSENSKKSNLTPYQYFNSGKSKLSYNQFKQHILNLSKSQDRISKKKKEYLLEERDINKFEVQKEFINRNLVDTRYATRELTNYLKAYFSANNMNVKVKTINGSFTDYLRKVWKFKKERNHGYKHHAEDALIIANADFLFKENKKLKAVNSVLEKPEIESKQLDIQVDSEDNYSEMFIIPKQVQDIKDFRNFKYSHRVDKKPNRQLINDTLYSTRKKDNSTYIVQTIKDIYAKDNTTLKKQFDKSPEKFLMYQHDPRTFEKLEVIMKQYANEKNPLAKYHEETGEYLTKYSKKNNGPIVKSLKYIGNKLGSHLDVTHQFKSSTKKLVKLSIKPYRFDVYLTDKGYKFITISYLDVLKKDNYYYIPEQKYDKLKLGKAIDKNAKFIASFYKNDLIKLDGEIYKIIGVNSDTRNMIELDLPDIRYKEYCELNNIKGEPRIKKTIGKKVNSIEKLTTDVLGNVFTNTQYTKPQLLFKRGN

SEQ ID NO: 421 - protein, 1334 aa, Staphylococcus pseudintermedius
MGRKPYILSLDIGTGSVGYACMDKGFNVLKYHDKDALGVYLFDGALTAQERRQFRTSRRRKNRRIKRLGLLQELLAPLVQNPNFYQFQRQFAWKNDNMDFKNKSLSEVLSFLGYESKKYPTIYHLQEALLLKDEKFDPELIYMALYHLVKYRGHFLFDHLKIENLTNNDNMHDFVELIETYENLNNIKLNLDYEKTKVIYEILKDNEMTKNDRAKRVKNMEKKLEQFSIMLLGLKFNEGKLFNHADNAEELKGANQSHTFADNYEENLTPFLTVEQSEFIERANKIYLSLTLQDILKGKKSMAMSKVAAYDKFRNELKQVKDIVYKADSTRTQFKKIFVSSKKSLKQYDATPNDQTFSSLCLFDQYLIRPKKQYSLLIKELKKIIPQDSELYFEAENDTLLKVLNTTDNASIPMQINLYEAETILRNQQKYHAEITDEMIEKVLSLIQFRIPYYVGPLVNDHTASKFGWMERKSNESIKPWNFDEVVDRSKSATQFIRRMTNKCSYLINEDVLPKNSLLYQEMEVLNELNATQIRLQTDPKNRKYRMMPQIKLFAVEHIFKKYKTVSHSKFLEIMLNSNHRENFMNHGEKLSIFGTQDDKKFASKLSSYQDMTKIFGDIEGKRAQIEEIIQWITIFEDKKILVQKLKECYPELTSKQINQLKKLNYSGWGRLSEKLLTHAYQGHSIIELLRHSDENFMEILTNDVYGFQNFIKEENQVQSNKIQHQDIANLTTSPALKKGIWSTIKLVRELTSIFGEPEKIIMEFATEDQQKGKKQKSRKQLWDDNIKKNKLKSVDEYKYIIDVANKLNNEQLQQEKLWLYLSQNGKCMYSGQSIDLDALLSPNATKHYEVDHIFPRSFIKDDSIDNKVLVIKKMNQTKGDQVPLQFIQQPYERIAYWKSLNKAGLISDSKLHKLMKPEFTAMDKEGFIQRQLVETRQISVHVRDFLKEEYPNTKVIPMKAKMVSEFRKKFDIPKIRQMNDAHHAIDAYLNGVVYHGAQLAYPNVDLFDFNFKWEKVREKWKALGEFNTKQKSRELFFFKKLEKMEVSQGERLISKIKLDMNHFKINYSRKLANIPQQFYNQTAVSPKTAELKYESNKSNEVVYKGLTPYQTYVVAIKSVNKKGKEKMEYQMIDHYVFDFYKFQNGNEKELALYLAQRENKDEVLDAQIVYSLNKGDLLYINNHPCYFVSRKEVINAKQFELTVEQQLSLYNVMNNKETNVEKLLIEYDFIAEKVINEYHHYLNSKLKEKRVRTFFSESNQTHEDFIKALDELFKVVTASATRSDKIGSRKNSMTHRAFLGKGKDVKIAYTSISGLKTTKPKSLFKLAESRNEL

SEQ ID NO: 422 - protein, 1334 aa, Staphylococcus pseudintermedius ED99; identical to SEQ ID NO: 421

SEQ ID NO: 423 - protein, 1112 aa, Staphylococcus simulans ACS-120-V-Sch1
MLVGLKFKQSILFENMENAEDIKESATGSDAISLSDDYYENLSEFLTDEQLNFIESANTFFMGIMLDRILKGATSISAAKVRDYKIFKSQLKLIKDIVYQNKYDKYHEFFVTSKEDMRAYQENPDAKNFGKLSKFDQYLIHSKDQYAKLMKDLKGLVPKEYTEVLNLIDEQKFLVVQNTTDNASIPYQNNVFEAENILRNQQKYYPEITEEMIGKVINLISFRIPYYVGPLTNKNGQSDFAWMIRKSDEQTLPWNFDKVIDKSKSAEKFIRRMTSKCTYLLEEDVLPKHSLLYQEMEVLNELNNVQLRGENEPKHRIHRLDPKVKQFIYHNLFQKKKNVTHKDLITLLQNSEHRNTLNKTSGQKLKVFGTQNDSKFASKLSTYNDMKAILGSVENKRQMIEELVLWITIFEDKAILKQKIGEKYPNITEKQLNQIVKLNYSGWGRLSEKLLTKEVNGRSLIDLMYSTENNFMEIITDKTLGFDCFIKNSNKVKNAKISYKDVAELRTSPALKKGIWNAIKMVREISNLFGAPEKIIIEFATEDQAKGKRQKSRSELWDDLVKKNNLKRNKEFEGLFEELKAYPDLDFSNPKLWLYIHQNGKCMYTKKPIDLERLMSDTNNQLYEIDHILPRTFVKDDSINNKVLVIQSANQKKSGDKMPLEIFDNHVLVPFWKMLYENDLISSSKLSKLMKKEFNDLDKEGFIQRQLVETRQIISHVSDFLTEEYPSTTVVPMKANVVSELRRKFDIPKIRQLNDWHHAVDAYLNGFVYQAARVFYPKVNLFEFNFKWEKVREKWRQLGEFTENNKKREFFLFKRMENYVNEYGEGMISKLIFDLDNFKFNYSRKVESTESAFYKQSAFSPKNTTAQYDSDKNKTAIYKEMKNKRGIVVSYTYVKKDQELIGYGVFNETVFEYVNNADVDMNTRALKIVRKAFPKLDIKKAQYLFSINKGDALLVNGHPFLFVSAYERINGKQLEFDIAMQRKIKQALSPYNNMTEQEKVEFYNQFAEKVIEEFRNSIGLQSRDRKVNLIKNLFNNTEKSNDSMTQSILEVLKMTKVSAERSKELKIRWNGQTPNTFIDTKNNAEIQYKSITGLKTTKPKSIFKLAESKNEL

SEQ ID NO: 424 - protein, 1370 aa, Streptococcus agalactiae 2603V/R
MNKPYSIGLDIGTNSVGWSIITDDYKVPAKKMRVLGNTDKEYIKKNLIGALLFDGGNTAADRRLKRTARRRYTRRRNRILYLQEIFAEEMSKVDDSFFHRLEDSFLVEEDKRGSKYPIFATLQEEKDYHEKFSTIYHLRKELADKKEKADLRLIYIALAHIIKFRGHFLIEDDSFDVRNTDISKQYQDFLEIFNTTFENNDLLSQNVDVEAILTDKISKSAKKDRILAQYPNQKSTGIFAEFLKLIVGNQADFKKYFNLEDKTPLQFAKDSYDEDLENLLGQIGDEFADLFSAAKKLYDSVLLSGILTVIDLSTKAPLSASMIQRYDEHREDLKQLKQFVKASLPEKYQEIFADSSKDGYAGYIEGKTNQEAFYKYLSKLLTKQEDSENFLEKIKNEDFLRKQRTFDNGSIPHQVHLTELKAIIRRQSEYYPFLKENQDRIEKILTFRIPYYIGPLAREKSDFAWMTRKTDDSIRPWNFEDLVDKEKSAEAFIHRMTNNDFYLPEEKVLPKHSLIYEKFTVYNELTKVRYKNEQGETYFFDSNIKQEIFDGVFKEHRKVSKKKLLDFLAKEYEEFRIVDVIGLDKENKAFNASLGTYHDLEKILDKDFLDNPDNESILEDIVQTLTLFEDREMIKKRLENYKDLFTESQLKKLYRRHYTGWGRLSAKLINGIRDKESQKTILDYLIDDGRSNRNFMQLINDDGLSFKSIISKAQAGSHSDNLKEVVGELAGSPAIKKGILQSLKIVDELVKVMGYEPEQIVVEMARENQTTNQGRRNSRQRYKLLDDGVKNLASDLNGNILKEYPTDNQALQNERLFLYYLQNGRDMYTGEALDIDNLSQYDIDHIIPQAFIKDDSIDNRVLVSSAKNRGKSDDVPSLEIVKDCKVFWKKLLDAKLMSQRKYDNLTKAERGGLTSDDKARFIQRQLVETRQITKHVARILDERFNNELDSKGRRIRKVKIVTLKSNLVSNFRKEFGFYKIREVNNYHHAHDAYLNAVVAKAILTKYPQLEPEFVYGDYPKYNSYKTRKSATEKLFFYSNIMNFFKTKVTLADGTVVVKDDIEVNNDTGEIVWDKKKHFATVRKVLSYPQNNIVKKTEIQTGGFSKESILAHGNSDKLIPRKTKDIYLDPKKYGGFDSPIVAYSVLVVADIKKGKAQKLKTVTELLGITIMERSRFEKNPSAFLESKGYLNIRADKLIILPKYSLFELENGRRRLLASAGELQKGNELALPTQFMKFLYLASRYNESKGKPEEIEKKQEFVNQHVSYFDDILQLINDFSKRVILADANLEKINKLYQDNKENISVDELANNIINLFTFTSLGAPAAFKFFDKIVDRKRYTSTKEVLNSTLIHQSITGLYETRIDLGKLGED

SEQ ID NO: 425 - protein, 1377 aa, Streptococcus agalactiae 515
MNKPYSIGLDIGTNSVGWSIITDDYKVPAKKMRVLGNTDKEYIKKNLIGALLFDGGNTAADRRLKRTARRRYTRRRNRILYLQEIFAEEMSKVDDSFFHRLEDSFLVEEDKRGSKYPIFATMQEEKYYHEKFPTIYHLRKELADKKEKADLRLVYLALAHIIKFRGHFLIEDDRFDVRNTDIQKQYQAFLEIFDTTFENNHLLSQNVDVEAILTDKISKSAKKDRILAQYPNQKSTGIFAEFLKLIVGNQADFKKHFNLEDKTPLQFAKDSYDEDLENLLGQIGDEFADLFSVAKKLYDSVLLSGILTVTDLSTKAPLSASMIQRYDEHHEDLKHLKQFVKASLPENYREVFADSSKDGYAGYIEGKTNQEAFYKYLLKLLTKQEGSEYFLEKIKNEDFLRKQRTFDNGSIPHQVHLTELRAIIRRQSEYYPFLKENQDRIEKILTFRIPYYVGPLAREKSDFAWMTRKTDDSIRPWNFEDLVDKEKSAEAFIHRMTNNDLYLPEEKVLPKHSLIYEKFTVYNELTKVRFLAEGFKDFQFLNRKQKETIFNSLFKEKRKVTEKDIISFLNKVDGYEGIAIKGIEKQFNASLSTYHDLKKILGKDFLDNTDNELILEDIVQTLTLFEDREMIKKCLDIYKDFFTESQLKKLYRRHYTGWGRLSAKLINGIRNKENQKTILDYLIDDGSANRNFMQLINDDDLSFKPIIDKARTGSHSDNLKEVVGELAGSPAIKKGILQSLKIVDELVKVMGYEPEQIVVEMARENQTTAKGLSRSRQRLTTLRESLANLKSNILEEKKPKYVKDQVENHHLSDDRLFLYYLQNGRDMYTKKALDIDNLSQYDIDHIIPQAFIKDDSIDNRVLVSSAKNRGKSDDVPSIEIVKARKMFWKNLLDAKLMSQRKYDNLTKAERGGLTSDDKARFIQRQLVETRQITKHVARILDERFNNEVDNGKKICKVKIVTLKSNLVSNFRKEFGFYKIREVNDYHHAHDAYLNAVVAKAILTKYPQLEPEFVYGMYRQKKLSKIVHEDKEEKYSEATRKMFFYSNLMNMFKRVVRLADGSIVVRPVIETGRYMGKTAWDKKKHFATVRKVLSYPQNNIVKKTEIQTGGFSKESILAHGNSDKLIPRKTKDIYLDPKKYGGFDSPIVAYSVLVVADIKKGKAQKLKTVTELLGITIMERSRFEKNPSAFLESKGYLNIRDDKLMILPKYSLFELENGRRRLLASAGELQKGNELALPTQFMKFLYLASRYNESKGKPEEIEKKQEFVNQHVSYFDDILQLINDFSKRVILADANLEKINKLYQDNKENIPVDELANNIINLFTFTSLGAPAAFKFFDKIVDRKRYTSTKEVLNSTLIHQSITGLYETRIDLGKLGED

SEQ ID NO: 426 - protein, 1370 aa, Streptococcus agalactiae; identical to SEQ ID NO: 424

SEQ ID NO: 427 - protein, 1378 aa, Streptococcus agalactiae ATCC 13813
MNKPYSIGLDIGTNSVGWSIITDDYKVPAKKMRVLGNTDKEYIKKNLIGALLFDGGNTAADRRLKRTARRRYTRRRNRILYLQEIFAEEMSKVDDSFFHRLEDSFLVEEDKRGSKYPIFATMQEEKYYHEKFPTIYHLRKELADKKEKADLRLIYLALAHIIKFRGHFLIEDDRFDVRNTDIQKQYQAFLEIFDTTFENNDLLSQNVDVEAILTDKISKSAKKDRILARYPNQKSTGIFAEFLKLIVGNQADFKKHFNLEDKTPLQFAKDSYDEDLENLLGQIGDEFADLFSAAKKLYDSVLLSGILTVIDLSTKAPLSASMIQRYDEHHEDLKHLKQFVKASLPENYREVFADSSKDGYAGYIEGKTSQEAFYKYLLKLLTKQEGSEYLLEKIKNEDFLRKQRTFDNGSIPHQVHLTELRAIIRRQSEYYPFLKENLDRIEKILTFRIPYYVGPLAREKSDFAWMTRKTDDSIRPWNFEDLVDKEKSAEAFIHRMTNNDLYLPEEKVLPKHSLIYEKFTVYNELTKVRFLAEGFKDFQFLNRKQKETIFNSLFKEKRKVTEKDIISFLNKVDGYEGIAIKGIEKQFNASLSTYHDLKKILGKDFLDNTDNELILEDIIQTLTLFEDREMIKKRLDIYKDFFTESQLKKLYRRHYTGWGRLSAKLINGIRNKENQKTILDYLIDDGSANRNFMQLIKDAGLSFKPIIDKARTGSHSDNLKEVVGELAGSPAIKKGILQSLKIVDELVKVMGYEPEQIVVEMARENQTTAKGLSRSRQRLTTLRESLGNLKSNILEEKKPKYVKDQVENHHLSDDRLFLYYLQNGKDMYTDDELDIDNLSQYDIDHIIPQAFIKDDSIDNRVLVSSAKNRGKSDDVPSIEIVKARKMFWKNLLDAKLMSQRKYDNLTKAERGGLTSDDKARFIQRQLVETRQITKHVARILDERFNNELDSKGRRIRKVKIVTLKSNLVSNFRKEFGFYKIREVNNYHHAHDAYLNAVVAKAILTKYPQLEPEFVYGLYRRKKLSKIVREDKEEKYSEATRKMFFYSNLMNMFKRVVRLADGSIVVRPVIETGRYMGKTAWDKKKHFATVRKVLSYPQNNIVKKTEIQTGGFSKESILAHGNSDKLIPRKTKDIYLDPKKYGGFDSPIVAYSVLVVADIKKGKAQKLKTVTELLGITIMERSRFEKNTSAFLESKGYLNIRDDKLMILPKYSLFELENGRRRLLASAGELQKGNELALPTQFMKFLYLASRYNESKGKPEEIEKKQEFVNQHVSYFDDILQLINDFSNRVILADANLEKINKLYQDNKENIPVDELANNIINLFTFTSLGAPAAFKFFDKIVDRKRYTSTKEVLNSTLIHQSITGLYETRIDLGKLGEG

SEQ ID NO: 428 - protein, 1370 aa, Streptococcus agalactiae CJB111
  misc_feature (117)..(117): Xaa can be any naturally occurring amino acid
MNKPYSIGLDIGTNSVGWSIITDDYKVPAKKMRVLGNTDKEYIKKNLIGALLFDGGNTAADRRLKRTARRRYTRRRNRILYLQEIFAEEMSKVDDSFFHRLEDSFLVEEDKRGSKYXIFATLQEEKDYHEKFSTIYHLRKELADKKEKADLRLIYIALAHIIKFRGHFLIEDDSFDVRNTDISKQYQDFLEIFNTTFENNDLLSQNVDVEAILTDKISKSAKKDRILAQYPNQKSTGIFAEFLKLIVGNQADFKKYFNLEDKTPLQFAKDSYDEDLENLLGQIGDEFADLFSAAKKLYDSVLLSGILTVIDLSTKAPLSASMIQRYDEHREDLKQLKQFVKASLPEKYQEIFADSSKDGYAGYIEGKTNQEAFYKYLSKLLTKQEDSENFLEKIKNEDFLRKQRTFDNGSIPHQVHLTELKAIIRRQSEYYPFLKENQDRIEKILTFRIPYYIGPLAREKSDFAWMTRKTDDSIRPWNFEDLVDKEKSAEAFIHRMTNNDFYLPEEKVLPKHSLIYEKFTVYNELTKVRYKNEQGETYFFDSNIKQEIFDGVFKEHRKVSKKKLLDFLAKEYEEFRIVDVIGLDKENKAFNASLGTYHDLEKILDKDFLDNPDNESILEDIVQTLTLFEDREMIKKRLENYKDLFTESQLKKLYRRHYTGWGRLSAKLINGIRDKESQKTILDYLIDDGRSNRNFMQLINDDGLSFKSIISKAQAGSHSDNLKEVVGELAGSPAIKKGILQSLKIVDELVKVMGYEPEQIVVEMARENQTTNQGRRNSRQRYKLLDDGVKNLASDLNGNILKEYPTDNQALQNERLFLYYLQNGRDMYTGEALDIDNLSQYDIDHIIPQAFIKDDSIDNRVLVSSAKNRGKSDDVPSLEIVKDCKVFWKKLLDAKLMSQRKYDNLTKAERGGLTSDDKARFIQRQLVETRQITKHVARILDERFNNELDSKGRRIRKVKIVTLKSNLVSNFRKEFGFYKIREVNNYHHAHDAYLNAVVAKAILTKYPQLEPEFVYGDYPKYNSYKTRKSATEKLFFYSNIMNFFKTKVTLADGTVVVKDDIEVNNDTGEIVWDKKKHFATVRKVLSYPQNNIVKKTEIQTGGFSKESILAHGNSDKLIPRKTKDIYLDPKKYGGFDSPIVAYSVLVVADIKKGKAQKLKTVTELLGITIMERSRFEKNPSAFLESKGYLNIRADKLIILPKYSLFELENGRRRLLASAGELQKGNELALPTQFMKFLYLASRYNESKGKPEEIEKKQEFVNQHVSYFDDILQLINDFSKRVILADANLEKINKLYQDNKENISVDELANNIINLFTFTSLGAPAAFKFFDKIVDRKRYTSTKEVLNSTLIHQSITGLYETRIDLGKLGED

SEQ ID NO: 429 - protein, 1370 aa, Streptococcus agalactiae COH1
MNKPYSIGLDIGTNSVGYSVVTDDYKVPAKKMRVLGNTDKEYIKKNLIGALLFDGGNTASDRRLKRTARRRYTRRRNRILYLQEIFAEEMSKVDDSFFHRLEDSFLVEDDKRGSKYPIFATMQEEKDYHEKFPTIYHLRKELADKKEKANLRLVYLALAHIIKFRGHFLIEDDSFDVRNTDIQRQYQAFLEIFDTTFENNHLLSQNIDVEGILTDKISKSAKKDRILAQYPNQKSTGIFAEFLKLIVGNQADFKKHFNLEDKTPLQFAKDSYDEDLENLLGQIGDEFADLFSVAKKLYDSVLLSGILTVTDLSTKAPLSASMIQRYDEHREDLKQLKQFVKASLPEKYQEIFTDSSKDGYAGYIEGKTNQGAFYKYLSKLLTKQEGSEYFLEKIKNEDFLRKQRTFDNGSIPHQVHLTELKAIIRRQSEYYPFLKENLDRIEKILTFRIPYYVGPLAREKSDFAWMTRKTDDSIRPWNFEELVDKEASAEAFIHRMTNNDLYLPEEKVLPKHSLIYEKFTVYNELTKVRYKNEQGETYFFDSNIKQEIFDGVFKEHRKVSKKKLLDFLAKEYEEFRIVDVIGLDKENKAFNASLGTYHDLKKILDKDFLDNPDNESILEDIVQTLTLFEDREMIKKRLENYKDLFTESQLKKLYRRHYTGWGRLSAKLINGIRDKESQKTILDYLISDGRANRNFMQLIHDDGLSFKPIIDKAQAGSHSDNLKEVVGELAGSPAIKKGILQSLKIVDELVKVMGYEPEQVVVEMARENQTTNQGRRNTRQRYKLLEEGVKNLASDLNGNILKEYPTDNQALQNERLFLYYLQNGRDMYTGEALDIDNLSQYDIDHIVPQAFIKDDSIDNRVLVSSAKNRGKSDNVPSIDIVKARKAFWKKLLDAKLMSQRKYDNLTKAERGGLTSDDKARFIQRQLVETRQITKHVARILDERFNNELDSKGRRIRKVKIVTLKSNLVSNFRKEFGFYKIREVNDYHHAHDAYLNAVVAKAILTKYPQLEPEFVYGDYPKYNSYKTRKSATEKLFFYSNIMNFFKTKVTLADGTVVVKDDIEVNNDTGEIVWDKKKHFATVRKVLSYPQVNIVKKTEIQTGGFSKESILAHGNSDKLIPRKTKDIYLDPKKYGGFDSPIVAYSVLVVADIKKGKAQKLKTVTELLGITIMERFRFEKNPSAFLESKGYLNIRDDKLMILPKYSLFELENGRRRLLASAGELQKGNELALPTQYMKFLYLASRYNELKGKPEEIEQKQEFVVQHVSYFDDILQIINDFSNRVILADANLEKINKLYQDNKENISVDELANNIINLFTFTSLGAPAAFKFFDKIVDRKRYTSTKEVLNSTLIHQSITGLYETRIDLGKLGED

SEQ ID NO: 430 - protein, 1370 aa, Streptococcus agalactiae FSL S3-026
MNKPYSIGLDIGTNSVGWSIITDDYKVPAKKMRVLGNTDKEYIKKNLIGALLFDGGNTAADRRLKRTARRRYTRRRNRILYLQEIFAEEMSKVDDSFFHRLEDSFLVEEDKRGSKYPIFATMQEEKYYHEKFPTIYHLRKELADKKEKADLRLIYLALAHIIKFRGHFLIEDDRFDVRNTDIQKQYQAFLEIFDTTFENNDLLSQNVDVEAILTDKISKSAKKDRILARYPNQKSTGIFAEFLKLIVGNQADFKKHFNLEDKTPLQFAKDSYDEDLENLLGQIGDEFADLFSAAKKLYDSVLLSGILTVTDLSTKAPLSASMIQRYDEHREDLKQLKQFVKASLPEKYQEIFADSSKDGYAGYIEGKTNQEAFYKYLSKLLTKQEGSEYLLEKIKNEDFLRKQRTFDNGSIPHQVHLTELRAIIRRQSEYYPFLKENLDRIEKILTFRIPYYVGPLAREKSDFAWMTRKTDDSIRPWNFEDLVDKEKSAEAFIHRMTNNDLYLPEEKVLPKHSLIYEKFTVYNELTKVRFLAEGFKDFQFLNRKQKETIFNSLFKEKRKVTEKDIISFLNKVDGYEGIAIKGIEKQFNASLSTYHDLKKILGKDFLDNTDNELILEDIVQTLTLFEDREMIRKRLDIYKDFFTESQLKKLYRRHYTGWGRLSAKLINGIRNKENQKTILDYLIDDGSANRNFMQLIKDAGLSFKPIIDKARTGSHSDNLKEVVGELAGSPAIKKGILQSLKIVDELVKVMGYEPEQIVVEMARENQTTAKGLSRLRQRLTTLRESLANLKSNILEEKKPKYVKDQVENHHLSDDRLFLYYLQNGKDMYTDDELDIDNLSQYDIDHIIPQAFIKDDSIDNRVLVSSAKNRGKSDDVPSVEIVKDCKVFWKKLLDAKLMSQRKYDNLTKAERGGLTSDDKARFIQRQLVETRQITKHVARILDERFNNELDSKGRRIRKVKIVTLKSNLVSNFRKEFGFYKIREVNNYHHAHDAYLNAVVAKAILTKYPQLEPEFVYGDYPKYNSYKTRKSATEKLFFYSNIMNFFKTKVTLADGTVVVKDDIEVNNDTGEIVWDKKKHFATVRKVLSYPQVNIVKKTEIQTGGFSKESILAHGNSDKLIPRKTKDIYLDPKKYGGFDSPIVAYSVLVVADIKKGKAQKLKTVTELLGITIMERSRFEKNPSAFLESKGYLNIRDDKLMILPKYSLFELENGRRRLLASADELQKGNELALPTQFMKFLYLASRYNELKGKPEEIEQKQEFVVQHVSYFDDILQIINDFSNRVILADANLEKINKLYQDNKENIPVDELANNIINLFTFTSLGAPAAFKFFDKIVDRKRYTSTKEVLNSTLIHQSITGLYETRIDLGKLGED

SEQ ID NO: 431 - protein, 1370 aa, Streptococcus agalactiae GB00112
MNKPYSIGLDIGTNSVGYSVVTDDYKVPAKKMRVLGNTDKEYIKKNLIGALLFDGGNTASDRRLKRTARRRYTRRRNRILYLQEIFAEEMSKVDDSFFHRLEDSFLVEDDKRGSKYPIFATMQEEKDYHEKFPTIYHLRKELADKKEKADLRLVYLALAHIIKFRGHFLIEDDSFDVRNTDIQRQYQAFLEIFDTTFENNHLLSQNIDVEGILTDKISKSAKKDRILAQYPNQKSTGIFAEFLKLIVGNQADFKKHFNLEDKTPLQFAKDSYDEDLENLLGQIGDEFADLFSVAKKLYDSVLLSGILTVTDLSTKAPLSASMIQRYDEHREDLKQLKQFVKASLPEKYQEIFTDSSKDGYAGYIEGKTNQGAFYKYLSKLLTKQEGSEYFLEKIKNEDFLRKQRTFDNGSIPHQVHLTELKAIIRRQSEYYPFLKENLDRIEKILTFRIPYYVGPLAREKSDFAWMTRKTDDSIRPWNFEELVDKEASAEAFIHRMTNNDLYLPEEKVLPKHSLIYEKFTVYNELTKVRYKNEQGETYFFDSNIKQEIFDGVFKEHRKVSKKKLLDFLAKEYEEFRIVDVIGLDKENKAFNASLGTYHDLKKILDKDFLDNPDNESILEDIVQTLTLFEDREMIKKRLENYKDLFTESQLKKLYRRHYTGWGRLSAKLINGIRDKESQKTILDYLISDGRANRNFMQLIHDDGLSFKPIIDKAQAGSHSDNLKEVVGELAGSPAIKKGILQSLKIVDELVKVMGYEPEQVVVEMARENQTTNQGRRNTRQRYKLLEEGVKNLASDLNGNILKEYPTDNQALQNERLFLYYLQNGRDMYTGEALDIDNLSQYDIDHIVPQAFIKDDSIDNRVLVSSAKNRGKSDNVPSIDIVKARKAFWKKLLDAKLMSQRKYDNLTKAERGGLTSDDKARFIQRQLVETRQITKHVARILDERFNNELDSKGRRIRKVKIVTLKSNLVSNFRKEFGFYKIREVNDYHHAHDAYLNAVVAKAILTKYPQLEPEFVYGDYPKYNSYKTRKSATEKLFFYSNIMNFFKTKVTLADGTVVVKDDIEVNNDTGEIVWDKKKHFATVRKVLSYPQVNIVKKTEIQTGGFSKESILAHGNSDKLIPRKTKDIYLDPKKYGGFDSPIVAYSVLVVADIKKGKAQKLKTVTELLGITIMERFRFEKNPSAFLESKGYLNIRDDKLMILPKYSLFELENGRRRLLASAGELQKGNELALPTQYMKFLYLASRYNELKGKPEEIEQKQEFVVQHVSYFDDILQIINDFSNRVILADANLEKINKLYQDNKENISVDELANNIINLFTFTSLGAPAAFKFFDKIVDRKRYTSTKEVLNSTLIHQSITGLYETRIDLGKLGED

SEQ ID NO: 432 - protein, 1370 aa, Streptococcus agalactiae H36B
  misc_feature (9)..(9): Xaa can be any naturally occurring amino acid
MNKPYSIGXDIGTNSVGWSIITDDYKVPAKKMRVLGNTDKEYIKKNLIGALLFDGGNTAADRRLKRTARRRYTRRRNRILYLQEIFAEEMSKVDDSFFHRLEDSFLVEEDKRGSKYPIFATLQEEKDYHEKFSTIYHLRKELADKKEKADLRLIYIALAHIIKFRGHFLIEDDSFDVRNTDISKQYQDFLEIFNTTFENNDLLSQNVDVEAILTDKISKSAKKDRILAQYPNQKSTGIFAEFLKLIVGNQADFKKYFNLEDKTPLQFAKDSYDEDLENLLGQIGDEFADLFSAAKKLYDSVLLSGILTVIDLSTKAPLSASMIQRYDEHREDLKQLKQFVKASLPEKYQEIFADSSKDGYAGYIEGKTNQEAFYKYLSKLLTKQEDSENFLEKIKNEDFLRKQRTFDNGSIPHQVHLTELKAIIRRQSEYYPFLKENQDRIEKILTFRIPYYIGPLAREKSDFAWMTRKTDDSIRPWNFEDLVDKEKSAEAFIHRMTNNDFYLPEEKVLPKHSLIYEKFTVYNELTKVRYKNEQGETYFFDSNIKQEIFDGVFKEHRKVSKKKLLDFLAKEYEEFRIVDVIGLDKENKAFNASLGTYHDLEKILDKDFLDNPDNESILEDIVQTLTLFEDREMIKKRLENYKDLFTESQLKKLYRRHYTGWGRLSAKLINGIRDKESQKTILDYLIDDGRSNRNFMQLINDDGLSFKSIISKAQAGSHSDNLKEVVGELAGSPAIKKGILQSLKIVDELVKVMGYEPEQIVVEMARENQTTNQGRRNSRQRYKLLDDGVKNLASDLNGNILKEYPTDNQALQNERLFLYYLQNGRDMYTGEALDIDNLSQYDIDHIIPQAFIKDDSIDNRVLVSSAKNRGKSDDVPSLEIVKDCKVFWKKLLDAKLMSQRKYDNLTKAERGGLTSDDKARFIQRQLVETRQITKHVARILDERFNNELDSKGRRIRKVKIVTLKSNLVSNFRKEFGFYKIREVNNYHHAHDAYLNAVVAKAILTKYPQLEPEFVYGDYPKYNSYKTRKSATEKLFFYSNIMNFFKTKVTLADGTVVVKDDIEVNNDTGEIVWDKKKHFATVRKVLSYPQNNIVKKTEIQTGGFSKESILAHGNSDKLIPRKTKDIYLDPKKYGGFDSPIVAYSVLVVADIKKGKAQKLKTVTELLGITIMERSRFEKNPSAFLESKGYLNIRADKLIILPKYSLFELENGRRRLLASAGELQKGNELALPTQFMKFLYLASRYNESKGKPEEIEKKQEFVNQHVSYFDDILQLINDFSKRVILADANLEKINKLYQDNKENISVDELANNIINLFTFTSLGAPAAFKFFDKIVDRKRYTSTKEVLNSTLIHQSITGLYETRIDLGKLGED

SEQ ID NO: 433 - protein, 1377 aa, Streptococcus agalactiae
MNKPYSIGLDIGTNSVGWSIITDDYKVPAKKMRVLGNTDKEYIKKNLIGALLFDGGNTAADRRLKRTARRRYTRRRNRILYLQEIFAEEMSKVDDSFFHRLEDSFLVEEDKRGSKYPIFATMQEEKYYHEKFPTIYHLRKELADKKEKADLRLVYLALAHIIKFRGHFLIEDDRFDVRNTDIQKQYQAFLEIFDTTFENNHLLSQNVDVEAILTDKISKSAKKDRILAQYPNQKSTGIFAEFLKLIVGNQADFKKHFNLEDKTPLQFAKDSYDEDLENLLGQIGDEFADLFSVAKKLYDSVLLSGILTVTDLSTKAPLSASMIQRYDEHHEDLKHLKQFVKASLPENYREVFADSSKDGYAGYIEGKTNQEAFYKYLLKLLTKQEGSEYFLEKIKNEDFLRKQRTFDNGSIPHQVHLTELRAIIRRQSEYYPFLKENQDRIEKILTFRIPYYVGPLAREKSDFAWMTRKTDDSIRPWNFEDLVDKEKSAEAFIHRMTNNDLYLPEEKVLPKHSLIYEKFTVYNELTKVRFLAEGFKDFQFLNRKQKETIFNSLFKEKRKVTEKDIISFLNKVDGYEGIAIKGIEKQFNASLSTYHDLKKILGKDFLDNTDNELILEDIVQTLTLFEDREMIKKCLDIYKDFFTESQLKKLYRRHYTGWGRLSAKLINGIRNKENQKTILDYLIDDGSANRNFMQLINDDDLSFKPIIDKARTGSHSDNLKEVVGELAGSPAIKKGILQSLKIVDELVKVMGYEPEQIVVEMARENQTTAKGLSRSRQRLTTLRESLANLKSNILEEKKPKYVKDQVENHHLSDDRLFLYYLQNGRDMYTKKALDIDNLSQYDIDHIIPQAFIKDDSIDNRVLVSSAKNRGKSDDVPSIEIVKARKMFWKNLLDAKLMSQRKYDNLTKAERGGLTSDDKARFIQRQLVETRQITKHVARILDERFNNEVDNGKKICKVKIVTLKSNLVSNFRKEFGFYKIREVNDYHHAHDAYLNAVVAKAILTKYPQLEPEFVYGMYRQKKLSKIVHEDKEEKYSEATRKMFFYSNLMNMFKRVVRLADGSIVVRPVIETGRYMRKTAWDKKKHFATVRKVLSYPQNNIVKKTEIQTGGFSKESILAHGNSDKLIPRKTKDIYLDPKKYGGFDSPIVAYSVLVVADIKKGKAQKLKTVTELLGITIMERSRFEKNPSAFLESKGYLNIRDDKLMILPKYSLFELENGRRRLLASAGELQKGNELALPTQFMKFLYLASRYNESKGKPEEIEKKQEFVNQHVSYFDDILQLINDFSKRVILADANLEKINKLYQDNKENIPVDELANNIINLFTFTSLGAPAAFKFFDKIVDRKRYTSTKEVLNSTLIHQSITGLYETRIDLGKLGED

SEQ ID NO: 434 - protein, 1370 aa, Streptococcus agalactiae
MNKPYSIGLDIGTNSVGWSIITDDYKVPAKKMRVLGNTDKEYIKKNLIGALLFDGGNTAADRRLKRTARRRYTRRRNRILYLQEIFAEEMSKVDDSFFHRLEDSFLVEEDKRGSKYPIFATMQEEKDYHEKFPTIYHLRKELADKKEKADLRLVYLALAHIIKFRGHFLIEDDRFDVRNTDIQKQYQAFLEIFDTSFENNHLLSQNVDVEAILTDKISKSAKKDRILAQYPNQKSTGIFAEFLKLIVGNQADFKKHFNLEDKTPLQFAKDSYDEDLENLLGQIGDEFADLFSAAKKLYDSVLLSGILTVTDLSTKAPLSASMIQRYDEHREDLKQLKQFVKASLPEKYQEIFADSSKDGYAGYIEGKTNQEAFYKYLSKLLTKQEDSEYFLEKIKNEDFLRKQRTFDNGSIPHQVHLTELKAIIRRQSEYYPFLKENQDKIEKILTFRIPYYVGPLARGNSDFAWMTRKTDDSIRPWNFEDLVDKEKSAEAFIHRMTNNDLYLPEEKVLPKHSLIYEKFTVYNELTKVRYKNEQGETYFFDSNVKQEIFDGVFKEHRKVSKKQLLDFLAKEFEEFRIVDVTGLDKENKAFNASLGTYHDLKKILDKDFLDNPDNESILEDIVQTITLFEDREMIKKRLENYKDLFTESQLKKLYRRHYTGWGRLSAKLINGIRDRESQKTILDYLISDGRANRNFMQLINDDGLSFKSIISKAQSGSHSDNLKEVVGELAGSPAIKKGILQSLKIVDELVKVMGYEPEQIVVEMARENQTTNQGRRNSRQRYKLLEDGVKNLASDLNGDILKEYPTDNQALQNERLFLYYLQNGRDMYTGEALDIDNLSQYDIDHIVPQAFIKDDSIDNRVLVSSAKNRGKSDDVPSIDIVKARKAFWKKLLDAKLISQRKYDNLTKAERGGLTPDDKAGFIQRQLVETRQITKHVARILDERFNNKVDDNNKPIRKVKIVTLKSNLVSNFRKEFGFYKIREVNNYHHAHDAYLNAVVAKAILTKYPQLEPEFVYGDYPKYNSYKTRKSATEKLFFYSNIMNFFKTKVTLADETVVVKDDIEVNNETGEIAWDKKKHFATVRKVLSYPQVNIVKKTEVQTGGFSKESILAHSNSDKLIPRKTKDIYLDPKKYGGFDSPIVAYSVLVLADIKKGKAQKLKTVKELIGITIMERERFEKNPSAFLESKGYLNIRTDKLIILPKYSLFELENGRRRLLASAGELQKGNELALPTQYMKFLYLASRYNESKGKPEEIEKKQEFVNQHVSYFDDILQLINDFSKRVILADANLEKINKLYSDNKDNTPVDELAKNIINLFTFTSLGAPAAFKFFDKSVDRKRYTSTKEVLDSTLIHQSITGLYETRIDLGKLGED

SEQ ID NO: 435 - protein, 1370 aa, Streptococcus agalactiae STIR-CD-17
MNKPYSIGLDIGTNSVGWSIITDDYKVPAKKMRVLGNTDKEYIKKNLIGALLFDGGNTAADRRLKRTARRRYTRRRNRILYLQEIFAEEMSKVDDSFFHRLEDSFLVEEDKRGSKYPIFATMQEEKDYHEKFPTIYHLRKELADKKEKADLRLVYLALAHIIKFRGHFLIEDDRFDVRNTDIQKQYQAFLEIFDTSFENNHLLSQNVDVEAILTDKISKSAKKDRILAQYPNQKSTGIFAEFLKLIVGNQADFKKHFNLEDKTPLQFAKDSYDEDLENLLGQIGDEFADLFSAAKKLYDSVLLSGILTVTDLSTKAPLSAYMIQRYDEHREDLKQLKQFVKASLPEKYQEIFADSSKDGYAGYIEGKTNQEAFYKYLSKLLTKQEDSEYFLEKIKNEDFLRKQRTFDNGSIPHQVHLTELKAIIRRQSEYYPFLKENQDKIEKILTFRIPYYVGPLARGNSDFAWMTRKTDDSIRPWNFEDLVDKEKSAEAFIHRMTNNDLYLPEEKVLPKHSLIYEKFTVYNELTKVRYKNEQGETYFFDSNVKQEIFDGVFKEHRKVSKKQLLDFLAKEFEEFRIVDVTGLDKENKAFNASLGTYHDLKKILDKDFLDNPDNESILEDIVQTITLFEDREMIKKRLENYKDLFTESQLKKLYRRHYTGWGRLSAKLINGIRDRESQKTILDYLISDGRANRNFMQLINDDGLSFKSIISKAQSGSHSDNLKEVVGELAGSPAIKKGILQSLKIVDELVKVMGYEPEQIVVEMARENQTTNQGRRNSRQRYKLLEDGVKNLASDLNGDILKEYPTDNQALQNERLFLYYLQNGRDMYTGEALDIDNLSQYDIDHIVPQAFIKDDSIDNRVLVSSAKNRGKSDDVPSIDIVKARKAFWKKLLDAKLISQRKYDNLTKAERGGLTPDDKAGFIQRQLVETRQITKHVARILDERFNNKVDDNNKPIRKVKIVTLKSNLVSNFRKEFGFYKIREVNNYHHAHDAYLNAVVAKAILTKYPQLEPEFVYGDYPKYNSYKTRKSATEKLFFYSNIMNFFKTKVTLADETVVVKDDIEVNNETGEIAWDKKKHFATVRKVLSYPQVNIVKKTEVQTGGFSKESILAHSNSDKLIPRKTKDIYLDPKKYGGFDSPIVAYSVLVLADIKKGKAQKLKTVKELIGITIMERERFEKNPSAFLESKGYLNIRTDKLIILPKYSLFELENGRRRLLASAGELQKGNELALPTQYMKFLYLASRYNESKGKPEEIEKKQEFVNQHISYFDDILQLINDFSKRVILADANLEKINKLYSDNKDNTPVDELAKNIINLFTFTSLGAPAAFKFFDKSVDRKRYTSTKEVLDSTLIHQSITGLYETRIDLGKLGED

SEQ ID NO: 436 - protein, 1125 aa, Streptococcus anginosus 1_2_62CV
MNGLVLGLDIGIASVGVGILNKETGEIIHANSRIFPAATADSNVERRGFRQGRRLGRRKKHRSARLNNLFEEFGFITDFSAIPLNLNPYALRVKGLSEELTNEELFIALKNIIKRRGISYLDDASEDGETASNEYGKAVEENRKLLADKTPGQIQLERFEKYGQVRGDFTVVENGENHRLINVFSTSAYKKEAERILRRQQEFNVRISDEFIEAYLTILTGKRKYYHGPGNEKSRTDYGRFRTDGTTLDNIFGILIGKCTFYPDEYRAAKASYTAQEFNLLNDLNNLTVPTETKKLSPEQKRQIVEYARTAKTLGTPTLLKYIAKLVDGSIDDIKGYRIDKSDKPEMHTFDAYRKMRTLDLVNIDALSRETLDDLAHILTLNTESEGILEALNSKMPSTFTKEQIDELIQFRKKNSAVFGKGWHNFSLKLMNELISELYETSEEQMTILTRLGKQRSREISKRTKYIDEKELTEEIYNPVVAKSVRQAIKIINEATKRYGIFDNIVIEMARENNEEDAKKDYIKRQKANQDEKNASMEKAAFQYNGKKELPDSIFHGHKELATKIRLWHQQGERCLYTGKNISIRDLIHNPHQYEIDHILPLSLSFDDGLANKVLVLATANQEKGQRTPFQAIDSMDDAWSYREFKQYVRNSKSLSNKKKDYLLTEEDISKIEVKQKFIERNLVDTRYSSRVVLNTLQEFYKTNDFDTKISVVRGQFTSQLRRKWKIEKSRDTYHHHAVDALIIAASSQLRLWKKQNNPLISYKEGQFVDPETGEILSLTDDEYKELVFRPPYDYFVDTLKSKSFEDSILFSYQVDSKYNRKISDATIYGTRKAQLGKDKQEETYVLGKIKDIYSQKGYEDFIKRYNKDETQFLIYHKDPQTFEKVIEEILKTYPDKELNEKGKEIPCNPFEKYRQENGPIRKYSKKGKGPEIKSLKYYDNKLGNHIDITPVNSQNQVVLQSLKPWRTDVYFNPRTSKYELMGLKYSDLRFEKGSGSYGISPEKYNKVKAKEGVNEDSEFKFTLYKNDLILIKDTETGEQQLFRYGSRNDTSKHYVELKPYEKAKFEGNQQLMNLLGTVAKGGQCLKGINKPNLSIYKVKTDVLGNKYFIKKEGDQPQLNFKKKF

SEQ ID NO: 437 - protein, 1345 aa, Streptococcus anginosus F0211
MDQKYSIGLDIGTNSVGWAVVTDDYKVPAKKMKVLGNTDKQSIKKNLLGALLFDSGETAEATRLKRTARRRYTRRRNRLRYLQEIFAEEMNKVDENFFQRLDDSFLVDEDKRGERHPIFGNIAAEVKYHDDFPTIYHLRKHLADISQKADLRLVYLALAHMIKFRGHFLIEGQLKAENTNVQALFKDFVEVYDKTVEESHLSEMTVDALSILTEKVSKSRRLENLIAHYPAEKKNTLFGNLIALSLGLQPNFKTNFQLSEDAKLQFSKDTYEEDLEGLLGEIGDEYADLFASAKNLYDAILLSGILTVDDNSTKAPLSASMVKRYEEHQKDLKKLKDFIKVNAPDQYNAIFKDKNKKGYAGYIENGVKQDEFYKYLKGILLQINGSGDFLDKIDREDFLRKQRTFDNGSIPHQIHLQEMHAILRRQEEHYPFLKENQDKIEKILTFRIPYYVGPLARKGSRFAWAEYKADEKITPWNFDDILDKEKSAEKFITRMTLNDLYLPEEKVLPKHSLLYETFTVYNELTKVKYVNEQGEAKFFDANMKQEIFDHVFKENRKVTKDKLLNYLNKEFEEFRIVNLTGLDKENKAFNSSLGTYHDLRKILDKSFLDDKANEKTIEDIIQTLTLFEDREMIRQRLQKYSDIFTKAQLKKLERRHYTGWGRLSYKLINGIRNKENKKTILDYLIDDGYANRNFMQLINDDALSFKEEIARAQIIGDVDDIANVVHDLPGSPAIKKGILQSVKIVDELVKVMGHNPANIIIEMARENQMTDKGRRNSQQRLKLLQDSLKNLDNPVNIKNVENQQLQNDRLFLYYIQNGKDMYTGETLDINNLSQYDIDHIIPQAFIKDNSLDNRVLTRSDKNRGKSDDVPSIEVVHEMKSFWSKLLSVKLITQRKFDNLTKAERGGLTEEDKAGFIKRQLVETRQITKHVAQILDERFNTEFDGNKRRIRNVKIITLKSNLVSNFRKEFELYKVREINDYHHAHDAYLNAVVGNALLLKYPQLEPEFVYGEYPKYNSYRSRKSATEKFLFYSNILRFFKKEDIQTNEDGEIAWNKEKHIKILRKVLSYPQVNIVKKTEEQTGGFSKESILPKGESDKLIPRKTKNSYWNPKKYGGFDSPVVAYSILVFADVEKGKSKKLRKVQDMVGITIMEKKRFEKHPVDFLEQRGYRNVRLEKIIKLPKYSLFELENKRRRLLASARELQKGNELVIPQRFTTLLYHSYQIEKNYEPEHREYVEKHKDEFKELLEYISVFSRKYVLADNNLTKIEMLFSKNKDAEVSSLAKSFISLLTFTAFGAPAAFNFFGENIDRKRYTSVTECLNATLIHQSITGLYETRIDLSKLGED

SEQ ID NO: 438 - protein, 1386 aa, Streptococcus anginosus SK1138
MNQKYSIGLDIGTNSVGWAVITDDYKVPAKKMKVLGNTDKQSIKKNLLGALLFDSGETAEATRLKRTARRRYTRRRNRLRYLQEIFAEEMMQVDESFFQRLDDSFLVDEDKRGERHPIFGNIAAEVKYHDEFPTIYHLRKHLADISQKADLRLVYLALAHMIKFRGHFLIEGQLKAENTNVQALFKDFVEVYDKTVEESHLSEITVDALSILTEKVSKSRRLENLIAHYPAEKKNTLFGNLIALFLGLQPNFKTNFQLSEDAKLQFSKDTYEEDLEGLLGEVGDEYADLFASAKNLYDAILLSGILTVDDNSTKAPLSASMVKRYEEHQKDLKKFEDFIKVNALDQYNAIFKDKNKKGYAGYIESGVKQDEFYKYLKGILLQINGSGDFLDKIDREDFLRKQRTFDNGSIPHQIHLQEMHAILRRQGEHYPFLKENQDKIEKILTFRIPYYVGPLARKGSRFAWAEYKADEKITPWNFDDILDKEKSAEKFITRMTLNDLYLPEEKVLPKHSLLYETFTVYNELTKVKYVNEQGEAKFFDANMKQEIFDHVFKENRKVTKDKLLNYLNKEFEEFRIVNLTGLDKENKVFNSSLGTYHDLRKILNKSFLDNKENAQIIEDIIQTLTLFEDREMIRQRLQKYSDIFTKAQLKKLERRHYTGWGRLSYKLINGIRNKENKKTILDYLIDDGYANRNFMQLINDDALSFKEEIAKAQIIGDVDDIANVVHDLPGSPAIKKGILQSVKIVDELVKVMGHNPANIIIEMARENQTTDRGRRNSQQRLKLLQDSLKNLDNPVNIKNVENQQLQNDRLFLYYIQNGKDMYTGETLDINNLSQYDIDHIIPQAYIKDDSFDNRVLTSSSENRGKSDNVPSIEVVCARKADWMRLRKAGLISQRKFDNLTKAERGGLTENDKAGFIKRQLVETRQITKHVAQVLDARFNAKHDENKKVIRDVKIITLKSNLVSQFRKDFKFYKVREINDYHHAHDAYLNAVIGTALLKKYPKLASEFVYGEFKKYDVRKFIAKSDKEIGKATAKYFFYSNLMNFFKKEVKFADGTVVERPDIETSEDGEIAWNKQTDFKIVRKVLSYPQVNIVKKTEVQTHGLDRGKPRGLFNANPSPKPKPDSSENLVGVKRNLDPKKYGGYAGISNSYAVLVKAIIEKGVKKKETMVLEFQGISILDRITFEKDKRAFLLGKGYKDIKKIIELPKYSLFELKDGSRRMLASILSTNNKRGEIHKGNELFVPQKFTTLLYHAKRINNPINKDHIEYVKKHRDDFKELLNYVLEFNEKYVGATKNGERLKEAVADFDSKSNEEICTSFLGAVNSKNAGLFELTSLGSASDFEFLGVKIPRYRDYTPSSLLKDSTLIHQSITGLYETRIDLSKLGED

SEQ ID NO: 439 - protein, 1396 aa, Streptococcus anginosus SK52 = DSM 20563
MTKPYSIGLDIGTNSVGWAVITDDYKVPAKKMKVLGNTNRDYIKKNLLGALLFDGGETAEGRRLKRTARRRYTRRKNRLRYLQEIFAEEMMQVDESFFQRLDDSFLVEEDKQGSKYPIFGTLKEEKEYHKKFKTIYHLREELANSKEKADLRLVYLALAHMIKFRGHFLYEGDLKAENTDVQALFKDFVEEYDKTIEESHLSEITVDALSILTEKVSKSSRLENLIAHYPTEKKNTLFGNLIALSLGLQANFKTNFQLSEDAKLQFSKDTYEEDLEGLLGEVGDEYADLFVSAKNLYDAILLSGILTVDDNSTKAPLSASMVKRYKEHKEELAAFKRFIKEKLPKKYEEIFKDDTKNGYAGYVGADKKLRKRSGKLATEEEFYKYVKGILNKVEGADYFLDKIDREDFLRKQRTFDNGSIPHQIHLQEMHAILRRQGEHYPFLKENQDKIEKILTFRIPYYVGPLARKGSRFAWAEYKADEKITPWNFDDILDKEKSAEKFITRMTLNDLYLPEEKVLPKHSPLYETFTVYNELTKVKYVNEQGEAKFFDTNMKQEIFDHVFKENRKVTKDKLLNYLNKEFEEFRIVNLTGLDKENKAFNASLGTYHDLRKILDKSFLDDKVNEKIIEDIIQTLTLFEDREMIRQRLQKYSDIFTTQQLKELERRHYTGWGRLSYKLINGIRNKENKKTILDYLIDDGYANRNFMQLINDDALSFKEEIARAQIIGDVDDIANVVHDLPGSPAIKKGILQSVKIVDELVKVMGHNPTNIIIEMARENQTTDKGRRNSQQRLKLLQDSLKNLDNPVNIKNVENQQLQNDRLFLYYIQNGKDMYTGETLDINNLSQYDIDHIIPQAFIKDNSLDNRVLTRSDKNRGKSDDVPSIEVVHEMKSFWSKLLSVKLITQRKFDNLTKAERGGLTENDKAGFIKRQLVETRQITKHVAQVLDARFNAKHDENKKVIRDVKIITLKSNLVSQFRKDFKFYKVREINDYHHAHDAYLNAVIGTALLKKYPKLASEFVYGEFKKYDVRKFIAKSDKEIGKATAKYFFYSNLMNFFKKEVKFADGTVVERPDIETSEDGEIAWNKQTDFKIVRKVLSYPQVNIVKKTEVQTHGLDRGKPRGLFNANPSPKPKPDSSENLVGIKRNLDPKKYGGYAGISNSYAVLVKAIIEKGVKKKETMVLEFQGISILDRITFEKDKRAFLLGKGYKDIKKIIELPKYSLFELKDGSRRMLASILSTNNKRGEIHKGNELFVPQKFTTLLYHAKRINNPINKDHIEYVKKHRDDFKELLNYVLEFNEKYVGATKNGERLKEAVADFDSKSNEEICTSFLGAVNSKNAGLFELTSLGSASDFEFLGVKIPRYRDYTPSSLLKDSILIHQSITGLYETRIDLSKLGED

SEQ ID NO: 440 - protein, 1373 aa, Streptococcus bovis ATCC 700338
MTKKNYSIGLDIGTNSVGWAVITDDYKVPAKKMKVLGNTDKKYIKKNLLGALLFDSGETAEATRLKRTARRRYTRRKNRLRYLQEIFAEEMTKVDESFFQRLDESFLRWDDDNKKLGRYPIFGNKADVVKYHQEFPTIYHLRKHLADSSEKADLRLVYLALAHMIKFRGHFLIEGELNAENTDVQKIFADFVGVYDRTFDDSHLSEITVDAASILTEKISKSRRLENLIKYYPTEKKNTLFGNLIALALGLQPNFKMNFKLSEDAKLQFSKDSYEEDLGELLGKIGDDYADLFTSAKNLYDAILLSGILIVDDNSTKAPLSASMIKRYVEHQEDLEKLKEFIKANKSELYHDIFKDKNKNGYAGYIENGVKQDEFYKYLKNTLSKIAGSDYFLDKIEREDFLRKQRTFDNGSIPHQIHLQEMHAILRRQGDYYPFLKENQDRIEKILTFRIPYYVGPLARKDSRFSWAEYHSDEKITPWNFDKVIDKEKSAEKFITRMTLNDLYLPEEKVLPKHSHVYETYAVYNELTKIKYVNEQGKDSFFDSNMKQEIFDHVFKENRKVTKEKLLNYLNKEFPEYRIKDLIGLDKENKSFNASLGTYHDLKKILDKAFLDDKVNEEVIEDIIKTLTLFEDKDMIHERLQKYSDIFTADQLKKLERRHYTGWGRLSYKLINGIRNKENNKTILDYLIDDGSANRNFMQLINDDTLPFKQIIQKSQVVGDVDDIEAVVHDLPGSPAIKKGILQSVKIVDELVKVMGDNPDNIVIEMARENQTTNRGRSQSQQRLKKLQNSLKELGSNILNEEKPSYIEDKVENSHLQNDQLFLYYIQNGKDMYTGDELDIDHLSDYDIDHIIPQAFIKDDSIDNRVLTSSAKNRGKSDDVPSLDIVRARKAEWVRLYKSGLISKRKFDNLTKAERGGLTEADKAGFIKRQLVETRQITKHVAQILDARFNTESDENDKVIRDVKVITLKSNLVSQFRKDFEFYKVREINDYHHAHDAYLNAVVGTALLKKYPKLASEFVYGEYKKYDIRKFITNSSDKATAKYFFYSNLMNFFKRVIRYSNGKVIVRPVVEYSKDTEDIAWDKKSNFRTICKVLSYPQVNIVKKVETQTGGFSKESILPKGDSDKLIPRKTKKAYWDTKKYGGFDSPTVAYSVFVVADVEKGKAKKLKTVKELVGISIMERSFFEENPVEFLENKGYHNIREDKLIKLPKYSLFEFEGGKRRLLASASELQKGNEMVIPGHLVKLLYHAQRINSFNSTKYLDYVSAHKKEFEKVLSCVEDFANLYVDVEKNLSKIRAVADSMDNFSIEEISNSFINLLTLTALGAPADFNFLGEKIPRKRYTSTKECLNATLIHQSITGLYETRIDLSKIGEE

SEQ ID NO: 441 - protein, 1375 aa, Streptococcus canis FSL Z3-227
MEKKYSIGLDIGTNSVGWAVITDDYKVPSKKFKVLGNTNRKSIKKNLMGALLFDSGETAEATRLKRTARRRYTRRKNRIRYLQEIFANEMAKLDDSFFQRLEESFLVEEDKKNERHPIFGNLADEVAYHRNYPTIYHLRKKLADSPEKADLRLIYLALAHIIKFRGHFLIEGKLNAENSDVAKLFYQLIQTYNQLFEESPLDEIEVDAKGILSARLSKSKRLEKLIAVFPNEKKNGLFGNIIALALGLTPNFKSNFDLTEDAKLQLSKDTYDDDLDELLGQIGDQYADLFSAAKNLSDAILLSDILRSNSEVTKAPLSASMVKRYDEHHQDLALLKTLVRQQFPEKYAEIFKDDTKNGYAGYVGIGIKHRKRTTKLATQEEFYKFIKPILEKMDGAEELLAKLNRDDLLRKQRTFDNGSIPHQIHLKELHAILRRQEEFYPFLKENREKIEKILTFRIPYYVGPLARGNSRFAWLTRKSEEAITPWNFEEVVDKGASAQSFIERMTNFDEQLPNKKVLPKHSLLYEYFTVYNELTKVKYVTERMRKPEFLSGEQKKAIVDLLFKTNRKVTVKQLKEDYFKKIECFDSVEIIGVEDRFNASLGTYHDLLKIIKDKDFLDNEENEDILEDIVLTLTLFEDREMIEERLKTYAHLFDDKVMKQLKRRHYTGWGRLSRKMINGIRDKQSGKTILDFLKSDGFSNRNFMQLIHDDSLTFKEEIEKAQVSGQGDSLHEQIADLAGSPAIKKGILQTVKIVDELVKVMGHKPENIVIEMARENQTTTKGLQQSRERKKRIEEGIKELESQILKENPVENTQLQNEKLYLYYLQNGRDMYVDQELDINRLSDYDVDHIVPQSFIKDDSIDNKVLTRSVENRGKSDNVPSEEVVKKMKNYWRQLLNAKLITQRKFDNLTKAERGGLSEADKAGFIKRQLVETRQITKHVARILDSRMNTKRDKNDKPIREVKVITLKSKLVSDFRKDFQLYKVRDINNYHHAHDAYLNAVVGTALIKKYPKLESEFVYGDYKVYDVRKMIAKSEQEIGKATAKRFFYSNIMNFFKTEVKLANGEIRKRPLIETNGETGEVVWNKEKDFATVRKVLAMPQVNIVKKTEVQTGGFSKESILSKRESAKLIPRKKGWDTRKYGGFGSPTVAYSILVVAKVEKGKAKKLKSVKVLVGITIMEKGSYEKDPIGFLEAKGYKDIKKELIFKLPKYSLFELENGRRRMLASATELQKANELVLPQHLVRLLYYTQNISATTGSNNLGYIEQHREEFKEIFEKIIDFSEKYILKNKVNSNLKSSFDEQFAVSDSILLSNSFVSLLKYTSFGASGGFTFLDLDVKQGRLRYQTVTEVLDATLIYQSITGLYETRTDLSQLGGD

SEQ ID NO: 442 - protein, 1345 aa, Streptococcus constellatus subsp. constellatus SK53
MGKPYSIGLDIGTNSVGWAVVTDDYKVPAKKMKVLGNTDKQSIKKNLLGALLFDSGETAEATRLKRTARRRYTRRKNRLRYLQEIFTGEMNKVDENFFQRLDDSFLVDEDKRGEHHPIFGNIAAEVKYHDDFPTIYHLRRHLADTSKKADLRLVYLALAHMIKFRGHFLYEGDLKAENTDVQALFKDFVEEYDKTIEESHLSEITVDALSILTEKVSKSSRLENLIAHYPTEKKNTLFGNLIALSLDLHPNFKTNFQLSEDAKLQFSKDTYEEDLEGFLGEVGDEYADLFASAKNLYDAILLSGILTVDDNSTKAPLSASMVKRYEEHQKDLKKLKDFIKVNAPDQYNAIFKDKNKKGYASYIESGVKQDEFYKYLKGILLKINGSGDFLDKIDREDFLRKQRTFDNGSIPHQIHLQEMHAILRRQGEHYPFLKENQDKIEKILTFRIPYYVGPLARKGSRFAWAEYKADEKITPWNFDDILDKEKSAEKFITRMTLNDLYLPEEKVLPKHSPLYEAFTVYNELTKVKYVNEQGEAKFFDTNMKQEIFDHVFKENRKVTKDKLLNYLNKEFEEFRIVNLTGLDKENKAFNSSLGTYHDLRKILDKSFLDDKANEKTIEDIIQTLTLFEDREMIRQRLQKYSDIFTKAQLKKLERRHYTGWGRLSYKLINGIRNKENKKTILDYLIDDGYANRNFMQLINDDALSFKEEIARAQIIDDVDDIANVVHDLPGSPAIKKGILQSVKIVDELVKVMGHNPANIIIEMARENQTTDKGRRNSQQRLKLLQDSLKNLDNPVNIKNVENQQLQNDRLFLYYIQNGKDMYTGETLDINNLSQYDIDHIIPQAFIKDNSLDNRVLTRSDKNRGKSDDVPSIEVVHEMKSFWSKLLSVKLITQRKFDNLTKAERGGLTEEDKAGFIKRQLVETRQITKHVAQILDERFNTEFDGNKRRIRNVKIITLKSNLVSNFRKEFELYKVREINDYHHAHDAYLNAVVGNALLLKYPQLEPEFVYGEYPKYNSYRSRKSATEKFLFYSNILRFFKKEDIQTNEDGEIAWNKEKHIKILRKVLSYPQVNIVKKTEEQTGGFSKESILPKGESDKLIPRKTKNSYWDPKKYGGFDSPVVAYSILVFADVEKGKSKKLRKVQDMVGITIMEKKRFEKNPVDFLEQRGYRNVRLEKIIKLPKYSLFELENKRRRLLASAKELQKGNELVIPQRFTTLLYHSYRIEKDYEPEHREYVEKHKDEFKELLEYISVFSRKYVLADNNLTKIEMLFSKNKDAEVSSLAKSFISLLTFTAFGAPAAFNFFGENIDRKRYTSVTECLNATLIHQSITGLYETRIDLSKLGED

SEQ ID NO: 443 - protein, 1371 aa, Streptococcus dysgalactiae
MDKKYSIGLDIGTNSVGWAVITDDYKVPSKKFKVLGNTDRHSIKKNLIGALLFDSGETAEATRLKRTARRRYTRRKNRIRYLQEIFSSEMSKVDDSFFHRLEESFLVEEDKKHERHPIFGNIVDEVAYHEKYPTIYHLRKKLADSTDKADLRLIYLALAHMIKFRGHFLIEGDLNPDNSDMDKLFIQLVQTYNQLFEENPINASRVDAKAILSARLSKSRRLENLIAQLPGEKRNGLFGNLIALSLGLTPNFKSNFDLAEDAKLQLSKDTYDDDLDNLLAQIGDQYADLFLAAKNLSDAILLSDILRVNSEITKAPLSASMIKRYDEHHQDLTLLKALVRQQLPEKYKEIFFDQSKNGYAGYIDGGASQEEFYKFIKPILEKMDGTEELLAKLNREDLLRKQRTFDNGSIPHQIHLGELHAILRRQEDFYPFLKDNREKIEKILTFRIPYYVGPLARGNSRFAWMTRKSEETITPWNFEEVVDKGASAQSFIERMTNFDKNLPNEKVLPKHSLLYEYFTVYNELTKVKYVTEGMRKPEFLSGKQKEAIVDLLFKTNRKVTVKQLKEDYFKKIECFDSVEISGVEDRFNASLGTYHDLLKIIKDKDFLDNEENEDILEDIVLTLTLFEDKEMIEERLKKYANLFDDKVMKQLKRRHYTGWGRLSRKLINGIRDKQSGKTILDFLKSDGFANRNFMQLINDDSLTFKEAIQKAQVSGQGHSLHEQIANLAGSPAIKKGILQSVKVVDELVKVMGHKPENIVIEMARENQTTQKGQKNSRERMKRIEEGIKELGSQILKEHPVENTQLQNEKLYLYYLQNGRDMYVDQELDINRLSDYDVDHIVPQSFIKDDSIDNKVLTRSDKNRGKSDNVPSEEVVKKMKNYWRQLLNAKLITQRKFDNLTKAERGGLSELDKAGFIKRQLVETRQITKHVAQILDSRMNTKYDENDKLIREVKVITLKSKLVSDFRKDFQFYKVREINNYHHAHDAYLNAVVGTALIKKYPKLESEFVYGDYKVYDVRKMIAKSEQEIGKATAKRFFYSNIMNFFKTEITLANGEIRKRPLIETNEETGEIVWDKGRDFATVRKVLSMPQVNIVKKTEVQTGALTNESIYARGSFDKLISRKHRFESSKYGGFGSPTVTYSVLVVAKSKVQDGKVKKIKTGKELIGITLLDKLVFEKNPLKFIEDKGYGNVQIDKCIKLPKYSLFEFENGTRRMLASVMANNNSRGDLQKANEMFLPAKLVTLLYHAHKIESSKELEHEAYILDHYNDLYQLLSYIERFASLYVDVEKNISKVKELFSNIESYSISEICSSVINLLTLTASGAPADFKFLGTTIPRKRYGSPQSILSSTLIHQSITGLYETRIDLSQLGGD

SEQ ID NO: 444 - protein, 1371 aa, Streptococcus dysgalactiae
MDKKYSIGLDIGTNSVGWAVITDDYKVPSKKFKVLGNTDRHSIKKNLIGALLFDSGETAEATRLKRTARRRYTRRKNRIRYLQEIFSSEMSKVDDSFFHRLEESFLVEEDKKHERHPIFGNIVDEVAYHEKYPTIYHLRKKLADSTDKADLRLIYLALAHMIKFRGHFLIEGDLNPDNSDVDKLFIQLVQTYNQLFEEKPINASGVDAKAILSARLSKSKRLENLIAQLPGEKKNGLFGNLIALSLGLTPNFKSNFDLAEDAKLQLSKDTYDDDLDNLLAQIGNQYADLFLAAKNLSDAILLSDILRVNSEITKAPLSASMIKRYDEHHQDLTLLKALVRQQLPEKYKEIFFDQSKNGYAGYIDGGASQEEFYKFIKPILEKMDGTEELLAKLNREDLLRKQRTFDNGSIPHQIHLGELHAILRRQEDFYPFLKDNREKIEKILTFRIPYYVGPLARGNSRFAWMTRKSEETITPWNFEEVVDKGASAQSFIERMTNFDKNLPNEKVLPKHSLLYEYFTVYNELTKVKYVTEGMRKPEFLSGKQKEAIVDLLFKTNRKVTVKQLKEDYFKKIECFDSVEISGVEDRFNASLGTYHDLLKIIKDKDFLDNEENEDILEDIVLTLTLFEDKEMIEERLKKYANLFDDKVMKQLKRRHYTGWGRLSRKLINGIRDKQSGKTILDFLKSDGFANRNFMQLINDDSLTFKEAIQKAQVSGQGHSLHEQIANLAGSPAIKKGILQSVKVVDELVKVMGHKPENIVIEMARENQTTQKGQKNSRERMKRIEEGIKELGSQILKEHPVENTQLQNEKLYLYYLQNGRDMYVDQELDINRLSDYDVDHIVPQSFIKDDSIDNKVLTRSDKNRGKSDNVPSEEVVKKMKNYWRQLLNAKLITQRKFDNLTKAERGGLSELDKAGFIKRQLVETRQITKHVAQILDSRMNTKYDENDKLIREVKVITLKSKLVSDFRKDFQFYKVREINNYHHAHDAYLNAVVGTALIKKYPKLESEFVYGDYKVYDVRKMIAKSEQEIGKATAKRFFYSNIMNFFKTEITLANGEIRKRPLIETNEETGEIVWDKGRDFATVRKVLSMPQVNIVKKTEVQTGALTNESIYARGSFDKLISRKHRFESSKYGGFGSPTVTYSVLVVAKSKVQDGKVKKIKTGKELIGITLLDKLVFEKNPLKFIEDKGYGNVQIDKCIKLPKYSLFEFENGTRRMLASVMANNNSRGDLQKANEMFLPAKLVTLLYHAHKIESSKELEHEAYILDHYNDLYQLLSYIERFASLYVDVEKNISKVKELFSNIESYSISEICSSVINLLTLTASGAPADFKFLGTTIPRKRYGSPQSILSSTLIHQSITGLYETRIDLSQLGGD

SEQ ID NO: 445 - protein, 1371 aa, Streptococcus dysgalactiae
MDKKYSIGLDIGTNSVGWAVITDDYKVPSKKFKVLGNTDRHSIKKNLIGALLFDSGETAEATRLKRTARRRYTRRKNRIRYLQEIFSSEMSKVDDSFFHRLEESFLVEEDKKHERHPIFGNIVDEVAYHEKYPTIYHLRKKLADSTDKADLRLIYLALAHMIKFRGHFLIEGDLNPDNSDMDKLFIQLVQTYNQLFEENPINASRVDAKAILSARLSKSRRLENLIAQLPGEKRNGLFGNLIALSLGLTPNFKSNFDLAEDAKLQLSKDTYDDDLDNLLAQIGDQYADLFLAAKNLSDAILLSDILRVNSEITKAPLSASMIKRYDEHHQDLTLLKALVRQQLPEKYKEIFFDQSKNGYAGYIDGGASQEEFYKFIKPILEKMDGTEELLAKLNREDLLRKQRTFDNGSIPHQIHLGELHAILRRQEDFYPFLKDNREKIEKILTFRIPYYVGPLARGNSRFAWMTRKSEETITPWNFEEVVDKGASAQSFIERMTNFDKNLPNEKVLPKHSLLYEYFTVYNELTKVKYVTEGMRKPEFLSGKQKEAIVDLLFKTNRKVTVKQLKEDYFKKIECFDSVEISGVEDRFNASLGTYHDLLKIIKDKDFLDNEENEDILEDIVLTLTLFEDKEMIEERLKKYANLFDDKVMKQLKRRHYTGWGRLSRKLINGIRDKQSGKTILDFLKSDGFANRNFMQLINDDSLTFKEAIQKAQVSGQGHSLHEQIANLAGSPAIKKGILQSVKVVDELVKVMGHKPENIVIEMARENQTTQKGQKNSRERMKRIEEGIKELGSQILKEHPVENTQLQNEKLYLYYLQNGRDMYVDQELDINRLSDYDVDHIVPQSFIKDDSIDNKILTRSDKNRGKSDNVPSEEVVKKMKNYWRQLLNAKLITQRKFDNLTKAERGGLSELDKAGFIKRQLVETRQITKHVAQILDSRMNTKYDENDKLIREVKVITLKSKLVSDFRKDFQFYKVREINNYHHAHDAYLNAVVGTALIKKYTKLESEFVYGDYKVYDVRKMIAKSEQEIGKATAKRFFYSNIMNFFKTEITLANGEIRKRPLIETNEETGEIVWDKGRDFATVRKVLSMPQVNIVKKTEVQTGALTNESIYARGSFDKLISRKHRFESSKYGGFGSPTVTYSVLVVAKSKVQDGKVKKIKTGKELIGMTLLDKLVFEKNPLKFIEDKGYGNVQIDKCIKLPKYSLFEFENGTRRMLASVMANNNSRGDLQKANEMFLPAKLVTLLYHAHKIESSKELEHEAYILDHYNDLYQLLSYIERFASLYVDVEKNISKVKELFSNIESYSISEICSSVINLLTLTASGAPADFKFLGTTIPRKRYGSPQSILSSTLIHQSITGLYETRIDLSQLGGD

SEQ ID NO: 446 - protein, 1371 aa, Streptococcus dysgalactiae
MDKKYSIGLDIGTNSVGWAVITDDYKVPSKKFKVLGNTDRHSIKKNLIGALLFDSGETAEATRLKRTARRRYTRRKNRIRYLQEIFSSEMSKVDDSFFHRLEESFLVEEDKKHERHPIFGNIVDEVAYHEKYPTIYHLRKKLADSTDKADLRLIYLALAHMIKFRGHFLIEGDLNPDNSDMDKLFIQLVQTYNQLFEENPINASRVDAKAILSARLSKSRRLENLIAQLPGEKRNGLFGNLIALSLGLTPNFKSNFDLAEDAKLQLSKDTYDDDLDNLLAQIGDQYADLFLAAKNLSDAILLSDILRVNSEITKAPLSASMIKRYDEHHQDLTLLKALVRQQLPEKYKEIFFDQSKNGYAGYIDGGASQEEFYKFIKPILEKMDGTEELLAKLNREDLLRKQRTFDNGSIPHQIHLGELHAILRRQEDFYPFLKDNREKIEKILTFRIPYYVGPLARGNSRFAWMTRKSEETITPWNFEEVVDKGASAQSFIERMTNFDKNLPNEKVLPKHSLLYEYFTVYNELTKVKYVTEGMRKPEFLSGKQKEAIVDLLFKTNRKVTVKQLKEDYFKKIECFDSVEISGVEDRFNASLGTYHDLLKIIKDKDFLDNEENEDILEDIVLTLTLFEDKEMIEERLKTYAHLFDDKVMKQLKRRHYTGWGRLSRKLINGIRDKQSGKTILDFLKSDGFANRNFIQLIHDDSLTFKEAIQKAQVSGQGHSLHEQIANLAGSPAIKKGILQSVKVVDELVKVMGHKPENIVIEMARENQTTQKGQKNSRERMKRIEEGIKELGSQILKEHPVENTQLQNEKLYLYYLQNGRDMYVDQELDINRLSDYDVDHIVPQSFIKDDSIDNKVLTRSDKNRGKSDDVPSEEVVKKMKNYWRQLLNAKLITQRKFDNLTKAERGGLSELDKAGFIKRQLVETRQITKHVAQILDSRMNTKYDENDKLIREVKVITLKSKLVSDFRKDFQFYKVREINNYHHAHDAYLNAVVGTALIKKYPKLESEFVYGDYKVYDVRKMIAKSEQEIGKATAKRFFYSNIMNFFKTEITLANGEIRKRPLIETNEETGEIVWNKGRDFATVRKVLSMPQVNIVKKTEVQTGALTNESIYARGSFDKLISRKHRFESSKYGGFGSPTVTYSVLVVAKSKVQDGKVKKIKTGKELIGITLLDKLVFEKNPLKFIEDKGYGNVQIDKCIKLPKYSLFEFENGTRRMLASVMANNNSRGDLQKANEMFLPAKLVTLLYHAHKIESSKELEHEAYILDHYNDLYQLLSYIERFASLYVDVEKNISKVKELFSNIESYSISEICSSVINLLTLTASGAPADFKFLGTTIPRKRYGSPQSILSSTLIHQSITGLYETRIDLSQLGGD

SEQ ID NO: 447 - protein, 1348 aa, Streptococcus equi
MKKPYTIALDIGTNSVGWVVVTDDYRVPTKKMKVLGNTERKTIKKNLIGALLFDSGDTAEGTRLKRTARRRYTRRKNRLRYLKEIFTEEMAKVDDGFFQRLEDSFYVLEDKEGNKHPIFANLADEVAYHKKYPTIYHLRKELVDNPQKADLRLIYLAVAHIIKFRGHFLIEGTLSSKNNNLQKSFDHLVDTYNLLFEEQRLLTEGINAKELLSAALSKSKRLENLISLIPGQKKTGIFGNIIALSLGLTPNFKANFGLSKDVKLQLAKDTYADDLDSLLAQIGDQYADLFLAAKNLSDAILLSDILTESDEITRAPLSASMVKRYREHHKDLVTLKTLIKDQLPEKYQEIFLDKTKNGYAGYIEGQVSQEEFYKYLKPILARLDGSEPLLLKIDREDFLRKQRTFDNGSIPHQIHLEELHAILRRQEVFYPFLKDNRKKIESLLTFRIPYYVGPLARGHSRFAWVKRKFDGAIRPWNFEEIVDEEASAQIFIEKMTKNDLYLPNEKVLPKHSLLYETFTVYNELTKVKYATEGMTRPQFLSADQKQAIVDLLFKTNRKVTVKQLKENYFKKIECWDSVEITGVEDSFNASLGTYHDLLKIIQDKDFLDNPDNQKIIEDIILTLTLFEDKKMISKRLDQYAHLFDKVVLNKLERHHYTGWGRLSGKLINGIRDKQSGKTILDFLKADGFANRNFMQLIHDSELSFIDEIAKAQVIGKTEYSKDLVGNLAGSPAIKKGISQTIKIVDELVKIMGYLPQQIVIEMARENQTTAQGIKNARQRMRKLEETAKKLGSNILKEHPVDNSQLQNDKRYLYYLQNGKDMYTGDDLDIDYLSSYDIDHIIPQSFIKNNSIDNKVLTSQGANRGKLDNVPSEAIVRKMKGYWQSLLRAGAISKQKFDNLTKAERGGLTQVDKAGFIQRQLVETRQITKHVAQILDSRFNTEFDDHNKRIRKVHIITLKSKLVSDFRKEFGLYKIRDINHYHHAHDAYLNAVVAKAILGKYPQLAPEFVYGDYPKYNSFKERQKATQKMLFYSNILKFFKDQESLHVNSDGEEIWNANKHLPIIKNVLSIPQVNIVKKTEVQTGGFYKESILSKGNSDKLIPRKNNWDTRKYGGFDSPTVAYSVLVIAKMEKGKAKVLKPVKEMVGITIMERTAFEENPVVFLEARGYREIQEHLIIKLPKYSLFELENGRRRLLASASELQKGNELFLPVDYMTFLYLAAHYHELTGSSEDVLRKKYFVDRHLHYFDDIIQMINDFAERHILASSNLEKINHTYHNNSDLPVNERAENIINVFTFVALGAPAAFKFFDATIDRKRYTSTKEVLNATLIHQSVTGLYETRIDLSQLGEN

SEQ ID NO: 448 - protein, 1377 aa, Streptococcus equinus ATCC 9812
MEKTYSIGLDIGTNSVGWAVITDDYKVPAKKMKVLGNTDKKYIKKNLLGALLFDSGETAEATRLKRAARRRYTRRKNRLRYLQEIFAKEMAKVDESFFQRLEESFLTDDDKTFDSHPIFGNKAEEDTYHQEFPTIYHLRKHLADSPEKVDLRLVYLALAHMIKFRGHFLIEGQLNAENTDVQKIFADFVGVYDRTFDDSHLSEITVDAASILTEKISKSRRLENLIKQYPTEKKNTLFGNLVALALGLQPNFKTNFKLSEDAKLQFSKDTYDEDLEELLGKIGDDYADLFTAAKNLYDAILLSGILTVDDNSTKAPLSASMIKRYEEHHEDLEKLKTFIKVNNFDKYHEIFKDKSKNGYAGYIENGVKQDIFYKHLKSIISEKNGGQYFLDKIEREDFLRKQRTFDNGSIPYQIHLQEMRTILRRQGEYYPFLKENQAKIEKILTFRIPYYVGPLARKNSRFAWAKYHSDEPITPWNFDEVVDKEKSAEKFITRMTLNDLYLPEEKVLPKHSYVYETFAVYNELTKIKYVNEQGKSFFFDANMKQEIFDHVFKENRKVTKAKLLSYLNNEFEEFRINDLIGLDKDSKSFNASLGTYHDLKKILDKSFLDDKTNEQIIEDIVLTLTLFEDRDMIHERLQKYSDIFTSQQLKKLERRHYTGWGRLSYKLINGIRNKENNKTILDFLIDDGDANRNFMQLINDDSLSFKTTIQEAQVVGDVDDIEAVVHDLPGSPAIKKGILQSVKIVDELVKVMGHNPQNIVIEMARENQITGYGRNRSNQRLKRLQDSLKEFGSDILSKKKPSYVDSKVENSHLQNDRLFLYYIQNGKDMYTGEELDIDHLSDYDIDHIIPQAFIKDNSIDNRVLTSSAKNRGKSDDVPSIEIVRNRKSYWYKLYKSGLISKRKFDNLTKAERGGLTETDKAGFIKRQLVETRQITKHVAQILDARFNTKCDENDKVIRDVKVITLKSSLVSQFRKEFKFYKVREINDYHHAHDAYLNAVVGTALLKKYPKLAPEFVYGEYKKYDVRKLVAKSSDNHSELGKATAKYFFYSNLMNFFKTEVKYADGRVFERPDIETNADGEVVWNKQRDFNIVRKVLSYPQVNIVKKVEVQTGGFSKESILPKGDSDKLIPRKTKKLQWETQKYGGFDSPTVAYSVLVVADVEKGKTRKLKTVKELVGISIMERSSFEENPVSFLEKKGYHNVQEDKLIKLPKYSLFEFEGGRRRLLASATELQKGNEVVLPQYMVNLLYHSQHVNNSHKPEHLNYVKQHKDEFKDIFNLIISIARINILKPKVVDNLINEFTEYGQEDISSLSESFINLLKFISFGAPGAFKFLKLDVKQSNLRYKSTTEALSATLIHQSVTGLYETRIDLSKLGEE

SEQ ID NO: 449 - protein, 1370 aa, Streptococcus gallolyticus
MTKKNYSIGLDIGTNSVGWAVITDDYKVPAKKMKVLGNTDKKYIKKNLLGALLFDSGETAEATRLKRTARRRYTRRKNRLRYLQEIFAEEMTKVDESFFYRLDESFLTTDEKDFERHPIFGNKAEEDAYHQKFPTIYHLRNYLADSSEKADLRLVYLALAHMIKYRGHFLIEGKLNAENTDVQKLFTDFVGVYDRTFDDSHLSEITVDVASTLTEKISKSRRLENLIKYYPTEKKNTLFGNLIALALGLQPNFKMNFKLSEDAKLQFSKDTYEEDLEELLGKIGDDYADLFTSAKNLYDAILLSGILTVDDNSTKAPLSASMIKRYVEHHEDLEKLKEFIKANKSELYHDIFKDKNKNGYAGYIENGVKQDEFYKYLKNTLSKIDGSDYFLDKIEREDFLRKQRTFDNGSIPHQIHLQEMHAILRRQGDYYPFLKEKQDRIEKILTFRIPYYVGPLVRKDSRFAWAEYRSDEKITPWNFDKVIDKEKSAEKFITRMTLNDLYLPEEKVLPKHSHVYETYAVYNELTKIKYVNEQGKESFFDSNMKQEIFDHVFKENRKVTKEKLLNYLNKEFPEYRIKDLIGLDKENKSFNASLGTYHDLKKILDKAFLDDKVNEEVIEDIIKTLTLFEDKDMIHERLQKYSDIFTANQLKKLERRHYTGWGRLSYKLINGIRNKENNKTILDYLIDDGSANRNFMQLINDDTLPFKQIIQKSQVVGDVDDIEAVVHDLPGSPAIKKGILQSVKIVDELVKVMGDNPDNIVIEMARENQTTNRGRSQSQQRLKKLQSSLKELGSNILNEEKPSYIEDKVENSHLQNDQLFLYYIQNGKDMYTGDELDIDHLSDYDIDHIIPQAFIKDDSIDNRVLTSSAKNRGKSDDVPSLDIVRARKAEWVRLYKSGLISKRKFDNLTKAERGGLTEADKAGFIKRQLVETRQITKHVAQILDARFNTEHDENDKVIRDVKVITLKSNLVSQFRKDFEFYKVREINDYHHAHDAYLNAVVGTALLKKYPKLASEFVYGEYKKYDIRKFITNSSDKATAKYFFYSNLMNFFKTKVKYADGTVFERPIIETNADGEIAWNKQIDFEKVRKVLSYPQVNIVKKVETQTGGFSKESILPKGDSDKLIPRKTKKVYWDTKKYGGFDSPTVAYSVFVVADVEKGKAKKLKTVKELVGISIMERSFFEENPVEFLENKGYHNIREDKLIKLPKYSLFEFEGGRRRLLASASELQKGNEMVLPGYLVELLYHAHRADNFNSTEYLNYVSEHKKEFEKVLSCVEDFANLYVDVEKNLSKIRAVADSMDNFSIEEISNSFINLLTLTALGAPADFNFLGEKIPRKRYTSTKECLTATLIHQSITGLYETRIDLSKLGEE

SEQ ID NO: 450 - protein, 1370 aa, Streptococcus gallolyticus subsp. gallolyticus TX20005; identical to SEQ ID NO: 449

SEQ ID NO: 451 - protein, 1371 aa, Streptococcus gallolyticus
MTEKNYSIGLDIGTNSVGWAVITDDYKVPAKKMKVLGNTDKKYIKKNLLGALLFDNGETAEATRLKRTARRRYTRRKNRLRYLQEIFAEEMAKVDESFFYRLDESFLTTDDKDFERHPIFGNKADEIKYHQEFPTIYHLRKHLADSHEKADLRLIYLALAHMIKFRGHFLIEGELNAENTDVQKLFEAFVEVYDRTFDDSNLSEITVDASSILTEKFSKSRRLENLIKHYPTEKKNTLFGNLVALALGLQPNFKTSFKLSEDAKLQFSKDTYEEDLEELIGKIGDEYADLFTSAKNLYDAILLSGILTVADNTTKAPLSASMIKRYNEHQVDLKKLKEFIKNNASDKYDEIFNDKDKNGYAGYIENGVKQDEFYKYLKTTLSKIDGSDYFLDKIEREDFLRKQRTFDNGSIPHQIHLQEMHAILRRQGEHYAFLKENQAKIEKILTFRIPYYVGPLARKNSRFAWAEYHSDEKITPWNFDEIIDKEKSAEKFITRMTLNDLYLPEEKVLPKHSLVYETYTVYNELTKVKYVNEQGKSNFFDANMKQEIFEHVFKENRKVTKDKFLNYLNKEFPEYRIQDLIGLDKENKSFNASLGTYHDLKKILDKSFLDDKTNETIIEDIIQTLTLFEDRDMIRQRLQKYSDIFTPQQLKKLERRHYTGWGRLSYKLINGIRNKENGKSILDYLIDDGYANRNFMQLISDDTLPFKQIIKDAQIIGDIDDVTSVVRELPGSPAIKKGILQSVKIVDELVKVMGHNPDNIVIEMARENQTTNRGRNQSQQRLKKLQDSLKELGSNILNEEKPSYIEGKVENNHLQDDRLFLYYIQNGKDMYTGDELDIDHLSDYDIDHIIPQAFIKDDSIDNRVLTSSAKNRGKSDDVPSLDIVHDRKADWIRLYKSGLISKRKFDNLTKAERGGLTENDKAGFIKRQLVETRQITKHVAQILDSRFNTERDENDKVIRNVKVITLKSNLVSQFRKDFKFYKVREINDYHHAHDAYLNAVVGTALLKKYPKLAPEFVYGEYKKYDIRKFITSSGDKATAKYFFYSNLMNFFKRVIRYSNGKVVVRPVIECSKDTGEIAWNKQTDFEKVRRVLSYPQVNIVKKVETQTGGFSKESILPKGNSDKLIPRKTKKFRWDTPKYGGFDSPNIAYSVFVIADVEKGKAKKLKTVKELVGISIMERSSFEENPVVFLEKKGYQNVQEDNLIKLPKYSLFEFEGGRRRLLASASELQKGNEVVLSRHLVELLYHAHRVNSFNNSEHLKYVSEHKKEFGEVLSCVENFAKSYVDVEKNLGKIRAVADKIDTFSIEDISISFVNLLTLTALGAPADFNFLGEKIPRKRYTSTKECLNATLIHQSITGLYETRIDLSKLGEE

SEQ ID NO: 452 - protein, 1130 aa, Streptococcus gallolyticus
MTNGKILGLDIGIASVGVGIIEAKTGKVVHANSRLFSAANAENNAERRGFRGSRRLNRRKKHRVKRVRDLFEKYEIVTDFRNLNLNPYELRVKGLTEQLTNEELFAALRTISKRRGISYLDDAEDDSTGSTDYAKSIDENRRLLKTKTPGQIQLERLEKYGQLRGNFTVYDENGEAHRLINVFSTSDYEKEARKILETQADYNKKITAEFIDDYVEILTQKRKYYHGPGNEKSRTDYGRFRTDGTTLENIFGILIGKCSFYPDEYRASKASYTAQEYNFLNDLNNLKVPTETGKLSTEQKEALVEFAKSTATLGPAKLLKEIAKILDCKVDEIKGYREDDKGKPDLHTFEPYRKLKFNLDSVNIDDLSREVLDKLADILTLNTEREGIEDAIRHNLPNQFTEGQISEIIKVRKSQSTAFNKGWHSFSAKLMNELIPELYATSDEQMTILTRLEKFKVNKKSSKNTKTIDEKEVTDEIYNPVVAKSVRQTIKIINAAVKKYGDFDKIVIEMPRDKNADDEKKFIDKRNKENKKEKDDALKRAAYLYNGTDKLPDEVFHGNKQLETKIRLWYQQGERCLYSGKPIPIQELVHNSNNFEIDHILPLSLSFDDSLANKVLVYAWTNQEKGQKTPYQVIDSMDAAWSFREMKDYVLKQKGLGKKKRDYLLTTENIDKIEVKKKFIERNLVDTRYASRVVLNSLQSALRELGKDTKISVIRGQFTSQLRRKWKIDKSRETYHHHAVDALIIAASSQLKLWEKQDNPMFVDYGNNQVVDKQTGEILSVSDDEYKELVFQPPYQGFVNMISSKGFEDEILFSYQVDSKYNRKVSDATIYSTRKAKIGKDKKEETYVLGKIKDIYSQNGFDTFIKKYNKDKTQFLMYQKDPLTWENVIEVILRDYPTTKKSEDGKNDVKCNPFEEYRRENGLVCKYSKKGKGTPIKSLKYYDKKLGNCIDITPEGSKNEVVLQSLNPWRADVYFNPETLKYELLGLKYSDLSFEKGTGKYHISQEKYDVIKEKEGIGKKSEFKFTLYRNDLILIKDTASGEQEIYRFLSRTMPNVKHYAELKPYDKEKFDNVQELVEALGEADKVGRCIKGLNKSNLSIYKVRTDVLGNKYFVKKEGDKPKLDFKNNKK

SEQ ID NO: 453 - protein, 1136 aa, Streptococcus gordonii
MNGLVLGLDIGIASVGVGILEKDTGKIIHASSRLFPAATADNNVERRSNRQGRRLNRRKKHRSVRLQDLFEGYGLLTDFSKVSMNLNPYQLRVQGMENQLTNEELFVALKNIVKRRGISYLDDASEDGGTVSSDYGKAVEENRKLLAEKTPGQIQLERFEKYGQLRGDFTVEENGEKHRLINVFSTSAYRKEAERILRKQQEFNSKITDEFIEDYLIILTGKRKYYHGPGNEKSRTDYGRFRTDGTTLDNIFGILIGKCTFYTEEYRASKASYTAQEFNLLNDLNNLTVPTETKKLSEEQKKLIIEYAKSAKTLGASTLLKYIAKMIDASVDQIRGYRVDVNNKPEMHTFEVYRKMQSLETIKVEELPRKVLDELAHILTLNTEREGIEEAINSKLKDIFNRDQVLELVQFRKNNSSLFSKGWHNFSIKLMMELIPELYETSEEQMTILTRLGKQRSKETSKRTKYIDEKELTEEIYNPVVAKSVRQAIKIINEATKKYGIFDNIVIEMARENNEEDAKKDYIKRQKANQDEKNAAMEKAAFQYNGKKELPDNIFHGHKELTTKIRLWHQQGEKCLYTGKNIPISDLIHNQYKYEIDHILPLSLSFDDSLSNKVLVLATANQEKGQRTPFQALDSMDDAWSYREFKSYVKDSKLLSNKKKDYLLTEEDISKIEVKQKFIERNLVDTRYSSRVVLNALQDFYKSHQLDTTISVVRGQFTSQLRRKWGIEKSRETYHHHAVDALIIAASSQLRLWKKHSNPLIAYKEGQFVDSETGEIVSLSDEEYKELVFKAPYDHFVDTLRSKKFEDSILFSYQVDSKYNRKISDATIYATRKAKLDKEKKEYTYTLGKIKDIYALGTKTPSKTGFYKFLDLYKTDKSQFLMYQKDRKTWDEVIEKIIEQYRPFKEYDKNGKEVDFNPFEKYRIGNGPIRKYSKKGNGPEIKSLKYYDILLGKHKNITPDGSRNTVALLSLNPWRTDVYYNSETKKYEFLGLKYADLCFEEGGAYGISEVKYKKIREKEGIGKNSEFKFTLYKNDLILIKDTETNCQQFFRFWSRTGKDNPKSFEKHKIELKPYEKAKFEKGEELKVLGKVPPSSNQFQKNMQIENLSIYKVKTDILGNKHFIKKEGDEPKLKFKK

SEQ ID NO: 454 - protein, 1129 aa, Streptococcus infantarius subsp. infantarius ATCC BAA-102
MSNGKILGLDIGVASVGVGIIDSKTGNVIHANSRLFSAANAENNAERRGFRGARRLTRRKKHRVKRVRDLFEKYDISTDFRNLNLNPYELRVKGLTEQLTNEELFAALRTIAKRRGISYLDDAEDDSTGSSDYAKSIDENRRLLKTKTPGQIQLERLEKYGQLRGNFTVYDENGEAHRLINVFSTSDYKNEARKILETQSNYNKQITDEFIEDYIEILTQKRKYYHGPGNEKSRTDYGRFRTDGTTLENIFGILIGKCSFYPEEYRASKASYTAQEFNFLNDLNNLKVPTETGKLSTEQKEYLVDFAKKSKALGASKLLKEIAKIVDCSVDDIKGYRVDNKDKPDLHTFEPYRKLKFNLSSIDIDELSRETLDKLADILTLNTEREGIEDAIKRNLPSQFTEEQISEIVQIRKNQSSAFNKGWHSFSAKLMNELIPELYVTSEEQMTILTRLEKFKVNKKSSKNTKTIDEKEITDEIYNPVVAKSVRQTIKIINAAVKKYGDFDKIVIEMPRDKNAEDEKKFIDKKQKENKKEKDDSLKRAAFLYNGTDNLPDGVFHGNKELKTKIRLWYQQGERCLYSGKLISIHDLVHNSNKFEIDHILPLSLSFDDSLANKVLVYAWTNQEKGQKTPYQVIDSMDTAWSFREMKDYVLKQKGLGKKKCEYLLTTENIDKIEVKKKFIERNLVDTRYASRVVLNSLQTALKELGKDTKVSVVRGQFTSQLRRKWNIDKSRETYHHHAVDALIIAASSQLKLWQKQENPMFESYGENQVVNKETGEILSISDDKYKELVFQPPYQGFVNTISSKGFEDEILFSYQVDSKFNRKVSDATIYSTRKAKLGKDKKDETYVLGKIKDIYSQDGFDTFIKRYKKDKTQFLMYQKDPLTWENVIEVILRDYPSEKLSEDGKKTVKCNPFEEYRRENGLICKYSKKGNGTPIKSLKYYDKKLGNCIDITPEKSKNRVVLRQISPWRADIYFNLETLKYELMGLKYSDLSFEKGTGKYHISQEKYDAIREKEGIGKKSEFKFTLYRNDLILIKDTLNNCERMLRFGSKNDTSKHYVELKPLEKGTFDSEEEILPVLGKVAKSGQFIKGLNKPNISIYKVRTDVLGNKFFIKKEGDKPKLDFKNNNK

SEQ ID NO: 455 - protein, 1375 aa, Streptococcus infantarius
MEKSYSIGLDIGTNSVGWAVITDDYKVPAKKMKVLGNTDKKYIKKNLLGALLFDSGETAEVTRLKRTARRRYTRRKNRLRYLQEIFAKEMTKVDESFFQRLEESFLTDDDKTFDSHPIFGNKAEEDAYHQKFPTIYHLRKYLADSQEKADLRLVYLALAHMIKYRGHFLIEGELNAENTDVQKLFNVFVETYDKIVDESHLSEIEVDASSILTEKVSKSRRLENLIKQYPTEKKNTLFGNLIALALGLQPNFKTNFKLSEDAKLQFSKDTYEEDLEELLGKVGDDYADLFISAKNLYDAILLSGILTVDDNSTKAPLSASMIKRYVEHHEDLEKLKEFIKINKLKLYHDIFKDKTKNGYAGYIDNGVKQDEFYKYLKTILTKIDDSDYFLDKIERDDFLRKQRTFDNGSIPHQIHLQEMHSILRRQGDYYPFLKENQAKIEKILTFRIPYYVGPLARKDSRFAWANYHSDEPITPWNFDEVVDKEKSAEKFITRMTLNDLYLPEEKVLPKHSHVYETFTVYNELTKIKYVNEQGESFFFDANMKQEIFDHVFKENRKVTKAKLLSYLNNEFEEFRINDLIGLDKDSKSFNASLGTYHDLKKILDKSFLDDKTNGQIIEDIVLTLTLFEDRDMIHERLQKYSDFFTSQQLKKLERRHYTGWGRLSYKLINGIRNKENNKTILDFLIDDGHANRNFMQLINDESLSFKTIIQEAQVVGDVDDIEAVVHDLPGSPAIKKGILQSVKIVDELVKVMGDNPDNIVIEMARENQTTGYGRNKSNQRLKRLQDSLKEFGSDILSKKKPSYVDSKVENSHLQNDRLFLYYIQNGKDMYTGEELDIDRLSDYDIDHIIPQAFIKDNSIDNKVLTSSAKNRGKSDDVPSIEIVRNRRSYWYKLYKSGLISKRKFDNLTKAERGGLTEADKAGFIKRQLVETRQITKHVAQILDARFNTKRDENDKVIRDVKVITLKSNLVSQFRKEFKFYKVREINDYHHAHDAYLNAVVGTALLKKYPKLTPEFVYGEYKKYDVRKLIAKSSDDYSEMGKATAKYFFYSNLMNFFKTEVKYADGRVFERPDIETNADGEVVWNKQKDFDIVRKVLSYPQVNIVKKVEAQTGGFSKESILSKGDSDKLIPRKTKKVYWNTKKYGGFDSPTVAYSVLVVADIEKGKAKKLKTVKELVGISIMERSFFEENPVSFLEKKGYHNVQEDKLIKLPKYSLFEFEGGRRRLLASATELQKGNEVMLPAHLVELLYHAHRIDSFNSTEHLKYVSEHKKEFEKVLSCVENFSNLYVDVEKNLSKVRAAAESMTNFSLEEISASFINLLTLTALGAPADFNFLGEKIPRKRYTSTKECLSATLIHQSVTGLYETRIDLSKLGEE

SEQ ID NO: 456 - protein, 1368 aa, Streptococcus iniae 9117
MRKPYSIGLDIGTNSVGWAVITDDYKVPSKKMRIQGTTDRTSIKKNLIGALLFDNGETAEATRLKRTTRRRYTRRKYRIKELQKIFSSEMNELDIAFFPRLSESFLVSDDKEFENHPIFGNLKDEITYHNDYPTIYHLRQTLADSDQKADLRLIYLALAHIIKFRGHFLIEGNLDSENTDVHVLFLNLVNIYNNLFEEDIVETASIDAEKILTSKTSKSRRLENLIAEIPNQKRNMLFGNLVSLALGLTPNFKTNFELLEDAKLQISKDSYEEDLDNLLAQIGDQYADLFIAAKKLSDAILLSDIITVKGASTKAPLSASMVQRYEEHQQDLALLKNLVKKQIPEKYKEIFDNKEKNGYAGYIDGKTSQEEFYKYIKPILLKLDGTEKLISKLEREDFLRKQRTFDNGSIPHQIHLNELKAIIRRQEKFYPFLKENQKKIEKLFTFKIPYYVGPLANGQSSFAWLKRQSNESITPWNFEEVVDQEASARAFIERMTNFDTYLPEEKVLPKHSPLYEMFMVYNELTKVKYQTEGMKRPVFLSSEDKEEIVNLLFKKERKVTVKQLKEEYFSKMKCFHTVTILGVEDRFNASLGTYHDLLKIFKDKAFLDDEANQDILEEIVWTLTLFEDQAMIERRLVKYADVFEKSVLKKLKKRHYTGWGRLSQKLINGIKDKQTGKTILGFLKDDGVANRNFMQLINDSSLDFAKIIKNEQEKTIKNESLEETIANLAGSPAIKKGILQSIKIVDEIVKIMGQNPDNIVIEMARENQSTMQGIKNSRQRLRKLEEVHKNTGSKILKEYNVSNTQLQSDRLYLYLLQDGKDMYTGKELDYDNLSQYDIDHIIPQSFIKDNSIDNTVLTTQASNRGKSDNVPNIETVNKMKSFWYKQLKSGAISQRKFDHLTKAERGALSDFDKAGFIKRQLVETRQITKHVAQILDSRFNSNLTEDSKSNRNVKIITLKSKMVSDFRKDFGFYKLREVNDYHHAQDAYLNAVVGTALLKKYPKLEAEFVYGDYKHYDLAKLMIQPDSSLGKATTRMFFYSNLMNFFKKEIKLADDTIFTRPQIEVNTETGEIVWDKVKDMQTIRKVMSYPQVNIVMKTEVQTGGFSKESIWPKGDSDKLIARKKSWDPKKYGGFDSPIIAYSVLVVAKIAKGKTQKLKTIKELVGIKIMEQDEFEKDPIAFLEKKGYQDIQTSSIIKLPKYSLFELENGRKRLLASAKELQKGNELALPNKYVKFLYLASHYTKFTGKEEDREKKRSYVESHLYYFDEIMQIIVEYSNRYILADSNLIKIQNLYKEKDNFSIEEQAINMLNLFTFTDLGAPSAFKFFNGDIDRKRYSSTNEIINSTLIYQSPTGLYETRIDLSKLGGK

SEQ ID NO: 457 - protein, 1338 aa, Streptococcus macacae NCTC 11558
MTKPYSIGLDIGTNSVGWAVVTDGYKVPAKKMKVLGNTDKSHIKKNLLGALLFDSGNTAKDRRLKRTARRRYTRRRNRILYLQEIFAEEMAKADESFFQRLNESFLTNDDKEFDSHPIFGNKAEEEAHHHKFPTIFHLRKHLADSTEKSDLRLIYLALAHMIKFRGHFLIEGQLKAENTNVQTLFDDFVEVYDKTVEESHLSEISVSSILTEKISKSRRLENLIKYYPTEKKNTLFGNLIALSLGLQPNFKTNFKLSEDAKLQFSKDTYEEDLGELLGKIGDNYADLFISAKNLYDAILLSGILTIDDNTTKAPLSASMIKRYEEHQEDLAQLKKFIRQNLPDQYSEVFSDKTKDGYAGYIDGKTNQEAFYKYIKNMLSKTEGADYFLDKIDREDFLRKQRTFDNGSVPHQIHLQEMHAILRRQGEYYPFLKENQDKIEKILTFRIPYYVGPLARKGSRFAWAEYKADKKVTPWNFDDILDKEKSAEEFITRMTLNDLYLPEEKVLPKHSLVYETFNVYNELTKVKYVNEQGKAIFFDANMKQEIFDHVFKENRKVTKDKLLNYLNKEFEEFRIVNLTGLDKENKAFNSSLGTYHDLRKILDKSFLDDKVNEKIIEDIIQTLTLFEDREMIRQRLQKYSDIFTTQQLKKLERRHYTGWGRLSAKLINGIRDKQSNKTILGYLIDDGYSNRNFMQLINDDSLPFKEEIARAQVIGETDDLNQLVSDIAGSPAIKKGILQSLKIVDELVKVMGHNPANIVIEMARENQTTAKGRRSSQQRYKRLEEAIKNLDHDLNHKILKEHPTDNQALQNDRLFLYYLQNGRDMYTEDPLDINRLSDYDIDHIIPQSFIKDDSIDNKVLVSSAKNRGKSDNVPSEDVVNRMRPFWNKLLSCGLISQRKYSNLTKKELKPDDKAGFIKRQLVETRQITKHVAQILDARFNTKRDENKKVIRDVKIITLKSNLVSQFRKDFKFYKVREINDYHHAHDAYLNAVIGKALLDVYPQLEPEFVYGEYPHFHGYKENKATAKKFFYSNIMNFFKKDDIRTDENGEIVWKKDEHISNIKRVLSYPQVNIVKKVEIQTVGQNGGLFDDNPKSPLEVTPSKLVPLKKELNPKKYGGYQKPTTAYPVLLITDTKQLIPISVMNKKQFEQNPVKFLRDRGYQQVGKNDFIKLPKYTLVDIGDGIKRLWASSKEIHKGNQLVVSKKSQILLYHAHHLDSDLSNDYLQNHNQQFDVLFNEIISFSKKCKLGKEHIQKIENVYSNKKNSASIEELAESFIKLLGFTQLGATSPFNFLGVKLNQKQYKGKKDYILPCTEGTLIRQSITGLYETRVDLSKIGED

SEQ ID NO: 458 - protein, 1130 aa, Streptococcus macedonicus
MTNGKILGLDIGIASVGVGIIEAKTGKVVHANSRLFSAANAENNAERRGFRGSRRLNRRKKHRVKRVRDLFEKYGIVTDFRNLNLNPYELRVKGLTEQLTNEELFAALRTISKRRGISYLDDAEDDSTGSTDYAKSIDENRRLLKTKTPGQIQLERLEKYGQLRGNFTVYDENGEAHRLINVFSTSDYEKEARKILETQADYNKKITAEFIDDYVEILTQKRKYYHGPGNEKSRTDYGRFRTDGTTLENIFGILIGKCNFYPDEYRASKASYTAQEYNFLNDLNNLKVPTETGKLSTEQKESLVEFAKNTAILGPAKLLKEIAKILDCKVDEIKGYREDDKGKPDLHTFEPYRKLKFNLDSVNIDYLSREVLDKLADILTLNTEREGIEDAIKRNLPNQFTEEQISEIINVRKSQSTAFNKGWHSFSAKLMNELIPELYATSDEQMTILTRLEKFKVKKKSSKNIKTIDEKEITDEIYNPVVAKSVRQTIKIINAAVKKYGDFDKIVIEMPRDKNADDEKKFINKRNKENKKEKDDALKRAAYLYNGTDKLPDEVFHGNKQLETKIRLWYQQGERCLYSGKPIPIQELVHNSNNFEIDHILPLSLSFDDSLANKVLVYSWTNQEKGQKTPYQVIDSMDAAWSFREMKEYVLKQKGLGKKKRDYLLTTENIDKIEVKKKFIERNLVDTRYASRVVLNSLQSALRELGKDTKVSVVRGQFTSQLRRKWKIDKSRETYHHHAVDALIIAASSQLKLWEKQDNPMFVDYGNNQVVDKQTGEILSVSDNEYKELVFQPPYQGFVNTISSKGFEDEILFSYQVDSKYNRKVSDATIYSTRKAKIGKDKKEETYVLGKIKDIYSQNGFDTFVKKYNKDKTQFLMYQKDPLTWENVIEVILGDYPTTKKSEDGKNDVKCNPFEEYRRENGLICKYSKKGKGTPIKSLKYYDKKLGNCIDITPEESRNKVILQSINPWRADVYFNPETLKYELMGLKYSDLSFEKGTGNYHISQEKYDAIKEKEGIGKKSEFKFTLYRNDLILIKDIASGEQEIYRFLSRTMPNVNHYVELKPYDKEKFDNVQELVEALGEADKVGRCIKSLNKPNISIYKVRTDVLGNKYFVKKEGDKPKLDFKNNKK

SEQ ID NO: 459 - protein, 1134 aa, Streptococcus mitis ATCC 6249
MNGLVLGLDIGIASEGVGILEKNSGKIIHANSRLFPAATADNNVERRKNRQARRLNRRKKHRGVRFQDLFEDYGLLTDFSKVSINLNPYRLRVDGLNQQLTNEELFIALKNIVKRRGISYLDDASEDGGAVSSDYGKAVEENRKLLAEQTPGQIQLERFEKYGQVRGDFTVVENGEKLRLINVFSTSAYKKEAERILRKQQEFNNQITDEFIEDYLKILTGKRKYYHGPGNEKSRTDYGRFRTDGTTLDNIFGILIGKCTFYPEEYRASKASYTAQEFNLLNDLNNLTVPTETKKLSEEQKKVIVEYAKEAKTLGASTLLKYIAKMIDASVDQIRGYRVDVNNKPEMHTFEVYRKMQSLETISVGELSRNVLDELAHILTLNTEREGMEEAINTKLKDSFSQDQVLELVQFRKNNSSLFSKGWHNFSLKLMMELIPELYETSEEQMTILTRLGKQKSKETSKRTKYIDEKELTEEIYNPVVAKSVRQAIKIINEATKKHGIFDNIVIEMARENNEEDAKKDYIKRQKANQDEKNAAMEKAAFQYNGKKELPDNIFHGHKELATKIRLWHQQGEKCLYTGKTIPISDLIYNQYKYEIDHILPLSLSFDDSLSNKVLALATANQEKGQRTPFQALDSMDDAWSYREFKSYVKDLKSLSNKKKDYLLTEEDISKIEVKQKFIERNLVDTRYSSRVVLNALQDFYKSHQFDTTISVVRGQFTSQLRRKWGLEKSRETYHHHAVDALIIAASSQLRLWKKQNNPLITYKEGQFVDSQTGEIISLTDDEYKELVFKAPYDHFVDTLSSKTFEDSILFSYQVDSKFNRKISDATIYATRKAKLDKEKKEYTYTLGKIKDIYSLGTKTPSKTGFYKFLDLYNKDKSQFLMFQKDRKTWDEVIEKIMEQYRPFKEYDKTGKLVDFNPFEKYRQENEPIRKYSKKGNGPEIKSLKYYDILLGKHKNITPEGSRNTVALLSLNPWRTDVYYNMETKKYEFLGLKYADLPFEEGGAYGISTETYNELREKEGIGKNSEFKFTLYKNDLILIKDTETNCQQIFRFWSRTGKDNPKSFEKHKIELKPYEKARFEKGEELEVLGKVPPSSNQLQKNMQIENLSIYKVKTDVLGNKHFIKKEGDKPKLKF

SEQ ID NO: 460 - protein, 1392 aa, Streptococcus mitis SK321
MNNNNYSIGLDIGTNSVGWAVITDDYKVPSKKMKVLGNTDKHFIKKNLIGALLFDEGATAEDRRFKRTARRRYTRRKNRLRYLQEIFSEEMSKVDSSFFHRLDDSFLVPEDKRGSKYPIFATLAEEKEYHKKFPTIYHLRKHLADSKEKTDLRLIYLALAHMIKYRGHFLYEESFDIKNNDIQKIFSEFISIYDNTFEGSSLSGQNAQVEAIFTDKISKSAKRERILKLFAYEKSTDLFSEFLKLIVGNQADFKKHFDLEEKAPLQFSKDTYDEDLENLLGQIGDDFADLFLVAKKLYDAILLSGILTVTDSSTKAPLSASMIERYENHQKDLAALKQFIQNNLQEKYDEVFSDQSKDGYARYINGKTTQEAFYKYIKNLLSKFEGSDYFLDKIEREDFLRKQRTFDNGSIPHQIHLQEMNAIIRRQGEHYPFLKEYKEKIETILTFRIPYYVGPLARGNRNFAWLTRNSDQAIRPWNFEEIVDQASSAEEFINKMTNYDLYLPEEKVLPKHSLLYETFAVYNELTKVKFISEGLRDYQFLDSGQKKQIVNQLFKEKRKVTEKDIIQYLHNVDGYDGIELKGIEKQFNASLSTYHDLLKIIKDKEFMDDPKNEEILENIVHTLTIFEDREMIKQRLAQYASIFDKKVIKALTRRHYTGWGKLSAKLINGICDKKTGKTILDYLIDDGYSNRNFMQLINDDGLSFKDIIQKAQVVGKTNDVKQVVQELPGSPAIKKGILQSIKLVDELVKVMGHAPESIVIEIARENQTTARGKKNSQQRYKRIEDALKNLAPGLDSNILKEHPTDNIQLQNDRLFLYYLQNGKDMYTGEALDINQLSSYDIDHIVPQAFIKDDSLDNRVLTSSKDNRGKSDNVPSLEVVQKRKAFWQQLLDSKLISEHKFNNLTKAERGGLDERDKVGFIRRQLVETRQITKHVAQILDARFNTEVNEKDKKNRTVKIITLKSNLVSNFRKEFKLYKVREINDYHHAHDAYLNAVVAKAILKKYPKLEPGFVYGDYQKYDIKRYISRSKDPKEVEKATEKYFFYSNLLNFFKEEVHYADGTIVKRENIEYSKDTGEIAWNKEKDFATIKKVLSLPQVNIVKKTEIQTHGLDRGKPRGLFNSNPSPKPSEDRKENLVPIKQGLDPRKYGGYAGISNSYAVLVKAIIEKGAKKQQKTVLEFQGISILDKINFEKNKENYLLEKGYIKILSTITLPKYSLFEFPDGTRRRLASILSTNNKRGEIHKGNELVIPEKYTTLLYHAKNINKTLEPEHLEYVEKHRNDFAKLLEYVLNFNDKYVGALKNGERIRQAFIDWETVDIEKLCFSFIGPRNSKNAGLFELTSQGSASDFEFLGVKIPRYRDYTPSSLLNATLIHQSITGLYETRIDLSKLGED

SEQ ID NO: 461 - protein, 1345 aa, Streptococcus mutans 11SSST2
MKKPYSIGLDIGTNSVGWAVVTDDYKVPAKKMKVLGNTDKSHIKKNLLGALLFDSGNTAADRRLKRTARRRYTRRRNRILYLQEIFAEEMSKVDDSFFHRLEDSFLVTEDKRGERHPIFGNLEEEVKYHENFPTIYHLRQYLADNPEKVDLRLVYLALAHIIKFRGHFLIEGKFDTRNNDVQRLFQEFLAVYDNTFENSSLQEQNVQVEEILTDKISKSAKKDRVLKLFPNEKSNGRFAEFLKLIVGNQADFKKHFELEEKAPLQFSKDTYEEELEVLLTQIGDNYAELFLSAKKLYDSILLSGILTVTDVSTKAPLSASMIQRYNEHQMDLAQLKQFIRQKLSDKYNEVFSDVSKDGYAGYIDGKTNQEAFYKYLKGLLNKIEGSGYFLDKIEREDFLRKQRTFDNGSIPHQIHLQEMRAIIRRQAEFYPFLADNQDRIEKILTFRIPYYVGPLARGKSDFAWLSRKSADKITPWNFDEIVDKESSAEAFINRMTNYDLYLPNQKVLPKHSLLYEKFTVYNELTKVKYKTEQGKTAFFDANMKQEIFDGVFKVYRKVTKDKLMDFLEKEFDEFRIVDLTGLDKENKAFNASYGTYHDLRKILDKDFLDNSKNEKILEDIVLTLTLFEDREMIRKRLENYSDLLTKEQVKKLERRHYTGWGRLSAELIHGIRNKESRKTLLDYLIDDGNSNRNFMQLINDDALSFKEEIAKAQVIGETDNLNQVVSDIAGSPAIKKGILQSLKIVDELVKIMGHQPENIVVEMARENQFTNQGRRNSQQRLKGLTDSIKEFGSQILKEHPVENSQLQNDRLFLYYLQNGRDMYTGEELDIDYLSQYDIDHIIPQAFIKDNSIDNRVLTSSKENRGKSDDVPSKDVVRKMKPYWSKLLSAKLITQRKFDNLTKAERGGLTDDDKAGFIKRQLVETRQITKHVARILDERFNTETDENNKKIRQVKIVTLKSNLVSNFRKEFELYKVREINDYHHAHDAYLNAVIGKALLGVYPQLEPEFVYGDYPHFHGHEENKATAKKFFYSNIMNFFKKDDVRTDKNGEIIWKKDEHISNIKKVLSYPQVNIVKKVEEQTGGFSKESILPKGNSDKLIPRKTKKFYWDTKKYGGFDSPIVAYSILVIADIEKGKSKKLKTVKALVGVTIMEKMTFERDPVAFLERKGYRNVQEENIIKLPKYSLFKLENGRKRLLASARELQKGNEIVLPNHLGTLLYHAKNIHKVDEPKHLDYVDKHKDEFKELLDVVSNFSKKYTLAEGNLEKIKELYAQNNGEDLKELSSSFINLLTFTAIGAPAAFKFFDKNIDRKRYTSTTEILNATLIHQSITGLYETRIDLSKLGGD

SEQ ID NO: 462 - protein, 1345 aa, Streptococcus mutans 11SSST2; identical to SEQ ID NO: 461

SEQ ID NO: 463 - protein, 1345 aa, Streptococcus mutans 11VS1
MKKPYSIGLDIGTNSVGWAVVTDDYKVPAKKMKVLGNTDKSHIKKNLLGALLFDSGNTAEDRRLKRTARRRYTRRRNRILYLQEIFSEEMGKVDDSFFHRLEDSFLVTEDKRGERHPIFGNLEEEVKYHENFPTIYHLRQYLADNPEKVDLRLVYLALAHIIKFRGHFLIEGKFDTRNNDVQRLFQEFLAVYDNTFENSSLQEQNVQVEEILTDKISKSAKKDRVLKLFPNEKSNGRFAEFLKLIVGNQADFKKHFELEEKAPLQFSKDTYEEELEVLLAQIGDNYAELFLSAKKLYDSILLSGILTVTDVSTKAPLSASMIQRYNEHQMDLAQLKQFIRQKLSDKYNEVFSDVSKDGYAGYIDGKTNQEAFYKYLKGLLNKIEGSGYFLDKIEREDFLRKQRTFDNGSIPHQIHLQEMRAIIRRQAEFYPFLADNQDRIEKILTFRIPYYVGPLARGKSDFAWLSRKSADKITPWNFDEIVDKESSAEAFINRMTNYDLYLPNQKVLPKHSLLYEKFTVYNELTKVKYKTEQGKTAFFDANMKQEIFDGVFKVYRKVTKDKLMDFLEKEFDEFRIVDLTGLDKENKVFNASYGTYHDLCKILDKDFLDNSKNEKILEDIVLTLTLFEDREMIRKRLENYSDLLTKEQVKKLERRHYTGWGRLSAELIHGIRNKESRKTILDYLIDDGNSNRNFMQLINDDALSFKEEIAKAQVIGETDNLNQVVSDIAGSPAIKKGILQSLKIVDELVKIMGHQPENIVVEMARENQFTKQGRRNSQQRLKGLTDSIKEFGSQILKEHPVENSQLQNDRLFLYYLQNGRDMYTGEELDIDYLSQYDIDHIIPQAFIKDNSIDNRVLTSSKENRGKSDDVPSKDVVRKMKSYWSKLLSAKLITQRKFDNLTKAERGGLTDDDKAGFIKRQLVETRQITKHVARILDERFYTETDENNKKIRQVKIVTLKSNLVSNFRKEFELYKVREINDYHHAHDAYLNAVIGKALLGVYPQLEPEFVYGDYPHFHGHKENKATAKKFFYSNIMNFFKKDDVRTDKNGEIIWKKDEHISNIKKVLSYPQVNIVKKVEEQTGGFSKESILPKGNSDKLIPRKTKKFYWDTKKYGGFDSPIVAYSILVIADIEKGKSKKLKTVKALVGVTIMEKMTFERDPVAFLERKGYRNVQEENIIKLPKYSLFKLENGRKRLLASARELQKGNEIVLPNHLGTLLYHAKNIHKVDEPKHLDYVDKHKDEFKELLDVVSNFSKKYTLAEGNLEKIKELYAQNNGEDLKELASSFINLLTFTAIGAPATFKFFDKNIDRKRYTSTTEILNATLIHQSITGLYETRIDLSKLGGD

SEQ ID NO: 464 - protein, 1345 aa, Streptococcus mutans 14D
MKKPYSIGLDIGTNSVGWAVVTDDYKVPAKKMKVLGNTDKSHIKKNLLGALLFDSGNTAADRRLKRTARRRYTRRRNRILYLQEIFAEEMSKVDDSFFHRLEDSFLVTEDKRGERHPIFGNLEEEVKYHENFPTIYHLRQYLADNPEKVDLRLVYLALAHIIKFRGHFLIEGKFDTRNNDVQRLFQEFLAVYDNTFENSSLQEQNVQVEEILTDKISKSAKKDRVLKLFPNEKSNGRFAEFLKLIVGNQADFKKHFELEEKAPLQFSKDTYEEELEVLLAQIGDNYAELFLSAKKLYDSILLSGILTVTDVSTKAPLSASMIQRYNEHQMDLAQLKQFIRQKLSDKYNEVFSDVSKDGYAGYIDGKTNQEAFYKYLKGLLNKIEGSGYFLDKIEREDFLRKQRTFDNGSIPHQIHLQEMRAIIRRQAEFYPFLADNQDRIEKILTFRIPYYVGPLARGKSDFAWLSRKSADKITPWNFDEIVDKESSAEAFINRMTNYDLYLPNQKVLPKHSLLYEKFTVYNELTKVKYKTEQGKTAFFDANMKQEIFDGVFKVYRKVTKDKLMDFLEKEFDEFRIVDLTGLDKENKAFNASYGTYHDLRKILDKDFLDNSKNEKILEDIVLTLTLFEDREMIRKRLENYSDLLTKEQVKKLERRHYTGWGRLSAELIHGIRNKESRKTILDYLIDDGNSNRNFMQLINDDALSFKEEIAKAQVIGETDNLNQVVSDIAGSPAIKKGILQSLKIVDELVKIMGHQPENIVVEMARENQFTNQGRRNSQQRLKGLTDSIKEFGSQILKEHPVEHSQLQNDRLFLYYLQNGRDMYTGEELDIDYLSQYDIDHIIPQAFIKDNSIDNRVLTSSKENRGKSDDVPSKNVVRKMKSYWSKLLSAKLITQRKFDNLTKAERGGLTDDDKAGFIKRQLVETRQITKHVARILDERFHTETDENNKKIRQVKIVTLKSNLVSNFRKEFELYKVREINDYHHAHDAYLNAVIGKALLGVYPQLEPEFVYGDYPHFHGHKENKATAKKFFYSNIMNFFKKDDVRTDKNGEIIWKKDEHISNIKKVLSYPQVNIVKKVEEQTGGFSKESILPKGNSDKLIPRKTKKFYWDTKKYGGFDSPIVAYSILVIADIEKGKSKKLKTVKALVGVTIMEKMTFERDPVAFLERKGYRNVQEENIIKLPKYSLFKLENGRKRLLASARELQKGNEIVLPNHLGTLLYHAKNIHKVDEPKHLDYVDKHKDEFKELLDVVSNFSKKYTLAEGNLEKIKELYAQNNGEDLKELASSFINLLTFTAIGAPATFKFFDKNIDRKRYTSTTEILNATLIHQSITGLYETRIDLSKLGGD

SEQ ID NO: 465 - protein, 1355 aa, Streptococcus mutans 15VF2
MKKSYSIGLDIGTNSVGWAVVTDDYKVPAKKMKVLGNTDKSHIKKNLLGALLFDSGNTAEDRRLKRTARRRYTRRRNRILYLQEIFSEEMGKVDDSFFHRLDESFLTDDDKNFDSHPIFGNKAEEDAYHQKFPTIYHLRKHLADSTEKADLRLVYLALAHMIKFRGHFLIEGELNAENTDVQKLFADFVGVYDRTFDDSHLSEITVDASSILTEKISKSRRLEKLINNYPKEKKNTLFGNLIALSLGLQPNFKTNFKLSEDAKLQFSKDTYEEDLEELLGKIGDDYADLFTLAKNLYDAILLSGILTADDSSTKAPLSASMIKRYAEHHEDLEKLKEFIKANKPELYHDIFKDETKNGYAGYIENGVKQDEFYKYLKNTLSKIAGSDYFLDKIEREDFLRKQRTFDNGSIPHQIHLQEMHAILRRQGDYYPFLKENQDRIEKILTFRIPYYVGPLARKNSRFAWAEYHSDEAVMPWNFDQVIDKESSAQAFIEHMTNNDLYLPNEKVLPKHSPLYEKYTVYNELTKIKYVTEIGEAKFFDANLKQEIFDGLFKHERKVTKKKLRTFLDKNFDEFRIVDIQGLDKETETFNASYATYQDLLKVIKDKVFMDNPENAEILENIVLTLTLFEDREMIKQRLAKYADVFDKKVIDQLARRHYTGWGRLSAKLLNGIRDKQSCKTIMDYLIDDAQSNRNLMQLITDDNLTFKDDIVKAQYVDNSDDLHQVVQSLAGSPAIKKGILQSLKIVDELVKVMGKEPEQIVVEMARENQTTAKGRRNSQQRYKRLKEAIKSLDRDLNHKILKEHPTDNQALQNNRLFLYYLQNGRDMYTGESLDINRLSDYDIDHVIPQAFIKDNSIDNRVLTSSKANRGKSDDVPSEDVVNRMRPFWNKLLSSGLISQRKYNNLTKKELTPDDKAGFIKRQLVETRQITKHVARMLDERFNKEFDDNNKRIRRVKIVTLKSNLVSSFRKEFELYKVREINDYHHAHDAYLNAVVVKALLVKYPKLEPEFVYGEYPKYNSYRERKTATQKMFFYSNIMNMFKSKVKLADDQIVERPMIEVNDETGEIAWDKTKHITTVKKVLSYPQVNIVKKVEEQTIGQNGGLFDDNPKSPLEVIPSKLVPLKKALNPEKYGGYQKPTTAYPILLIVDTKQLIPISVMDKKRFEQNPVKFLKDKGYQQIEKNNFVKLPKYTLVDIGNGIKRLWASSKEVHKGNQLVVSKKSQDLLYHAHHLDNDYSNEYVKNHYQQFDILFNEITSFSKKCKLGKEHIQKIEEAYSKERDSASIEELADGFIKLLGFTQLGATSPFSFLGIKLNQKQYTGKKDYLLPCMEATLIHQSITGLYETRIDLNKLGGD

SEQ ID NO: 466 - protein, 1355 aa, Streptococcus mutans 15VF2; identical to SEQ ID NO: 465

SEQ ID NO: 467 - protein, 1345 aa, Streptococcus mutans 1SM1
MKKPYSIGLDIGTNSVGWAVVTDDYKVPAKKMKVLGNTDKSHIKKNLLGALLFDSGNTAEDRRLKRTARRRYTRRRNRILYLQEIFSEEMGKVDDSFFHRLEDSFLVTEDKRGERHPIFGNLEEEVKYHENFPTIYHLRQYLADNPEKVDLRLVYLALAHIIKFRGHFLIEGKFDTRNNDVQRLFQEFLAVYDNTFENSSLQEQNVQVEEILTDKISKSAKKDRVLKLFPNEKSNGRFAEFLKLIVGNQADFKKHFELEEKAPLQFSKDTYEEDLEELLGKIGDDYADLFTLAKNLYDAILLSGILTADDSSTKAPLSASMIQRYNEHQMDLAQLKQFIRQKLSDKYNEVFSDVSKDGYAGYIDGKTNQEAFYKYLKGLLNKIEGSGYFLDKIEREDFLRKQRTFDNGSIPHQIHLQEMRAIIRRQAEFYPFLADNQDRIEKILTFRIPYYVGPLARGKSDFAWLSRKSADKITPWNFDEIVDKESSAEAFINRMTNYDLYLPNQKVLPKHSLLYEKFTVYNELTKVKYKTEQGKTAFFDANMKQEIFDGVFKVYRKVTKDKLMDFLEKEFDEFRIVDLTGLDKENKVFNASYGTYHDLCKILDKDFLDNSKNEKILEDIVLTLTLFEDREMIRKRLENYSDLLTKEQVKKLERRHYTGWGRLSAELIHGIRNKESRKTILDYLIDDGNSNRNFMQLINDDALSFKEEIAKAQVIGETDNLNQVVSDIAGSPAIKKGILQSLKIVDELVKIMGHQPENIVVEMARENQFTNQGRRNSQQRLKGLTDSIKEFGSQILKEHPVENSQLQNDRLFLYYLQNGRDMYTGEELDIDYLSQYDIDHIIPQAFIKDNSIDNRVLTSSKENRGKSDDVPSKDVVRKMKSYWSKLLSAKLITQRKFDNLTKAERGGLTDDDKAGFIKRQLVETRQITKHVARILDERFYTETDENNKKIRQVKIVTLKSNLVSNFRKEFELYKVREINDYHHAHDAYLNAVIGKALLGVYPQLEPEFVYGDYPHFHGHKENKATAKKFFYSNIMNFFKKDDVRTDKNGEIIWKKDEHISNIKKVLSYPQVNIVKKVEEQTGGFSKESILPKGNSDKLIPRKTKKFYWDTKKYGGFDSPIVAYSILVIADIEKGKSKKLKTVKALVGVTIMEKMTFERDPVAFLERKGYRNVQEENIIKLPKYSLFKLENGRKRLLASARELQKGNEIVLPNHLGTLLYHAKNIHKVDEPKHLDYVDKHKDEFKELLDVVSNFSKKYTLAEGNLEKIKELYAQNNGEDLKELASSFINLLTFTAIGAPATFKFFDKNIDRKRYTSTTEILNATLIHQSITGLYETRIDLSKLGGD

SEQ ID NO: 468 - protein, 1345 aa, Streptococcus mutans 1SM1; identical to SEQ ID NO: 467

SEQ ID NO: 469 - protein, 1350 aa, Streptococcus mutans 24
MKKPYSIGLDIGTNSVGWAVVTDDYKVPAKKMKVLGNTDKSHIEKNLLGALLFDSGNTAEDRRLKRTARRRYTRRRNRILYLQEIFSEEMGKVDDSFFHRLEDSFLVTEDKRGERHPIFGNLEEEVKYHENFPTIYHLRQYLADNPEKVDLRLVYLALAHIIKFRGHFLIEGKFDTRNNDVQRLFQEFLAVYDNTFENSSLQEQNVQVEEILTDKISKSAKKDRVLKLFPNEKSNGRFAEFLKLIVGNQADFKKHFELEEKAPLQFSKDTYEEELEVLLAQIGDNYAELFLSAKKLYDSILLSGILTVTDVSTKAPLSASMIQRYNEHQMDLTQLKQFIRQKLSDKYNEVFSDVSKDGYAGYIDGKTNQEAFYKYLKGLLNKIEGSGYFLDKIEREDFLRKQRTFDNGSIPHQIHLQEMRAIIRRQAEFYPFLADNQDRIEKILTFRIPYYVGPLARGKSDFAWLSRKSADKITPWNFDEIVDKESSAEAFINRMTNYDLYLPNQKVLPKHSLLYEKFTVYNELTKVKYKTEQGKTAFFDANMKQEIFDGVFKVYRKVTKDKLMDFLEKEFDEFRIVDLTGLDKENKAFNASYGTYHDLRKILDKDFLDNSKNEKILEDIVLTLTLFEDREMIRKRLKNYSDLLTKEQLKKLERRHYTGWGRLSAELIHGIRNKESRKTILDYLIDDGNSNRNFMQLINDDALSFKEEIAKAQVIGETDNLNQVVSDIAGSPAIKKGILQSLKIVDELVKIMGHQPENIVVEMARENQFTNQGRQNSQQRLKGLTDSIKEFGSQILKEHPVENSQLQNDRLFLYYLQNGRDMYTGEELDIDYLSQYDIDHIIPQAFIKDNSIDNRVLTSSKENRGKSDDVPSEDVVNRMRPFWNKLLSSGLISQRKYNNLTKKELTLDDKAGFIKRQLVETRQITKHVARMLDERFNKEFDDNNKRICKVKIVTLKSNLVSSFRKEFELYKVREINDYHHAHDAYLNAVVVKALLVKYSKLEPEFVYGEYPKYNSYRERKTATQKMFFYSNIMNMFKSKVKLADDQIVERPMIEVNDETGEIAWDKTKHITTVKKVLSYPQVNIVKKVEEQTIGQNGGLFDDNPKSPLEVIPSKLVPLKKALNPEKYGGYQKPTTAYPILLIVDTKQLIPISVMDKKRFEQNPVKFLKDKGYQQIEKNNFVKLPKYTLVDIGNGIKRLWASSKEVHKGNQLVVSKKSQDLLYHAHHLDNDYSNEYVKNHYQQFDILFNEITSFSKKCKLGKEHIQKIEEAYSKERDSASIEELADGFIKLLGFTQLGATSPFSFLGIKLNQKQYTGKKDYLLPCMEATLIHQSITGLYETRIDLSKLGGD

SEQ ID NO: 470 - protein, 1350 aa, Streptococcus mutans 24; identical to SEQ ID NO: 469

SEQ ID NO: 471 - protein, 1345 aa, Streptococcus mutans 2VS1; identical to SEQ ID NO: 464

SEQ ID NO: 472 - protein, 1345 aa, Streptococcus mutans 2VS1; identical to SEQ ID NO: 464

SEQ ID NO: 473 - protein, 1345 aa, Streptococcus mutans 3SN1; identical to SEQ ID NO: 463

SEQ ID NO: 474 - protein, 1345 aa, Streptococcus mutans 3SN1; identical to SEQ ID NO: 463

SEQ ID NO: 475 - protein, 1345 aa, Streptococcus mutans 4SM1
MKKPYSIGLDIGTNSVGWAVVTDDYKVPAKKMKVLGNTDKSHIKKNLLGALLFDSGNTAEDRRLKRTARRRYTRRRNRILYLQEIFSEEMGKVDDSFFHRLEDSFLVTEDKRGERHPIFGNLEEEVKYHENFPTIYHLRQYLADNPEKVDLRLVYLALAHIIKFRGHFLIEGKFDTRNNDVQRLFQEFLAVYDNTFENSSLQEQNVQVEEILTDKISKSAKKDRVLKLFPNEKSNGRFAEFLKLIVGNQADFKKHFELEEKAPLQFSKDTYEEDLEELLGKIGDDYADLFTLAKNLYDAILLSGILTADDSSTKAPLSASMIQRYNEHQMDLAQLKQFIRQKLSDKYNEVFSDVSKDGYAGYIDGKTNQEAFYKYLKGLLNKIEGSGYFLDKIEREDFLRKQRTFDNGSIPHQIHLQEMRAIIRRQAEFYPFLADNQDRIEKILTFRIPYYVGPLARGKSDFAWLSRKSADKITPWNFDEIVDKESSAEAFINRMTNYDLYLPNQKVLPKHSLLYEKFTVYNELTKVKYKTEQGKTAFFDANMKQEIFDGVFKVYRKVTKDKLMDFLEKEFDEFRIVDLTGLDKENKVFNASYGTYHDLCKILDKDFLDNSKNEKILEDIVLTLTLFEDREMIRKRLENYSDLLTKEQVKKLERRHYTGWGRLSAELIHGIRNKESRKTILDYLIDDGNSNRNFMQLINDDALSFKEEIAKAQVIGETDNLNQVVSDIAGSPAIKKGILQSLKIVDELVKIMGHQPENIVVEMARENQFTNQGRRNSQQRLKGLTDSIKEFGSQILKEHPVENSQLQNDRLFLYYLQNGRDMYTGEELDIDYLSQYDIDHIIPQAFIKDNSIDNRVLTSSKENRGKSDDVPSKDVVRKMKPYWSKLLSAKLITQRKFDNLTKAERGGLTDDDKAGFIKRQLVETRQITKHVARILDERFNTETDENNKKIRQVKIVTLKSNLVSNFRKEFELYKVREINDYHHAHDAYLNAVIGKALLGVYPQLEPEFVYGDYPHFHGHEENKATAKKFFYSNIMNFFKKDDVRTDKNGEIIWKKDEHISNIKKVLSYPQVNIVKKVEEQTGGFSKESILPKGNSDKLIPRKTKKFYWDTKKYGGFDSPIVAYSILVIADIEKGKSKKLKTVKALVGVTIMEKMTFERDPVAFLERKGYRNVQEENIIKLPKYSLFKLENGRKRLLASARELQKGNEIVLPNHLGTLLYHAKNIHKVDEPKHLDYVDKHKDEFKELLDVVSNFSKKYTLAEGNLEKIKELYAQNNGEDLKELASSFINLLTFTAIGAPATFKFFDKNIDRKRYTSTTEILNATLIHQSITGLYETRIDLSKLGGD

SEQ ID NO: 476 - protein, 1345 aa, Streptococcus mutans 4SM1; identical to SEQ ID NO: 475

SEQ ID NO: 477 - protein, 1345 aa, Streptococcus mutans 4VF1
MKKPYSIGLDIGTNSVGWAVVTDDYKVPAKKMKVLGNTDKSHIKKNLLGALLFDSGNTAEDRRLKRTARRRYTRRRNRILYLQEIFSEEMGKVDDSFFHRLEDSFLVTEDKRGERHPIFGNLEEEVKYHENFPTIYHLRQYLADNPEKVDLRLVYLALAHIIKFRGHFLIEGKFDTRNNDVQRLFQEFLAVYDNTFENSSLQEQNVQVEEILTDKISKSAKKDRVLKLFPNEKSNGRFAEFLKLIVGNQADFKKHFELEEKAPLQFSKDTYEEELEVLLAQIGDNYAELFLSAKKLYDSILLSGILTVTDVSTKAPLSASMIQRYNEHQMDLAQLKQFIRQKLSDKYNEVFSDVSKDGYAGYIDGKTNQEAFYKYLKGLLNKIEGSGYFLDKIEREDFLRKQRTFDNGSIPHQIHLQEMRAIIRRQAEFYPFLADNQDRIEKILTFRIPYYVGPLARGKSDFAWLSRKSADKITPWNFDEIVDKESSAEAFINRMTNYDLYLPNQKVLPKHSLLYEKFTVYNELTKVKYKTEQGKTAFFDANMKQEIFDGVFKVYRKVTKDKLMDFLEKEFDEFRIVDLTGLDKENKVFNASYGTYHDLCKILDKDFLDNSKNEKILEDIVLTLTLFEDREMIRKRLENYSDLLTKEQVKKLERRHYTGWGRLSAELIHGIRNKESRKTILDYLIDDGNSNRNFMQLINDDALSFKEEIAKAQVIGETDNLNQVVSDIAGSPAIKKGILQSLKIVDELVKIMGHQPENIVVEMARENQFTKQGRRNSQQRLKGLTDSIKEFGSQILKEHPVENSQLQNDRLFLYYLQNGRDMYTGEELDIDYLSQYDIDHIIPQAFIKDNSIDNRVLTSSKENRGKSDDVPSKDVVRKMKSYWSKLLSAKLITQRKFDNLTKAERGGLTDDDKAGFIKRQLVETRQITKHVARILDERFYTETDENNKKIRQVKIVTLKSNLVSNFRKEFELYKVREINDYHHAHDAYLNAVIGKALLGVYPQLEPEFVYGDYPHFHGHKENKATAKKFFYSNIMNFFKKDDVRTDRNGEIIWKKDEHISNIKKVLSYPQVNIVKKVEEQTGGFSKESILPKGNSDKLIPRKTKKFYWDTKKYGGFDSPIVAYSILVIADIEKGKSKKLKTVKALVGVTIMEKMTFERDPVAFLERKGYRNVQEENIIKLPKYSLFKLENGRKRLLASARELQKGNEIVLPNHLGTLLYHAKNIHKVDEPKHLDYVDKHKDEFKELLDVVSNFSKKYTLAEGNLEKIKELYAQNNGEDLKELASSFINLLTFTAIGAPATFKFFDKNIDRKRYTSTTEILNATLIHQSITGLYETRIDLSKLGGD

SEQ ID NO: 478 - protein, 1345 aa, Streptococcus mutans 4VF1; identical to SEQ ID NO: 477

SEQ ID NO: 479 - protein, 1345 aa, Streptococcus mutans 5SM3
MKKPYSIGLDIGTNSVGWAVVTDDYKVPAKKMKVLGNTDKSHIEKNLLGALLFDSGNTAEDRRLKRTARRRYTRRRNRILYLQEIFSEEMGKVDDSFFHRLEDFFLVTEDKRGERHPIFGNLEEEVKYHENFPTIYHLRQYLADNPEKVDLRLVYLALAHIIKFRGHFLIEGKFDTRNNDVQRLFQEFLAVYDNTFENSSLQEQNVQVEEILTDKISKSAKKDRVLKLFPNEKSNGRFAEFLKLIVGNQADFKKHFELEEKAPLQFSKDTYEEELEVLLAQIGDNYAELFLSAKKLYDSILLSGILTADDSSTKAPLSASMIQRYNEHQMDLAQLKQFIRQKLSDKYNEVFSDVSKDGYAGYIDGKTNQEAFYKYLKGLLNKIEGSGYFLDKIEREDFLRKQRTFDNGSIPHQIHLQEMRAIIRRQSEFYPFLADNQDRIEKILTFRIPYYVGPLARGKSDFAWLSRKSADKITPWNFDEIVDKESSAEAFINRMTNYDLYLPNQKVLPKHSLLYEKFTVYNELTKVKYKTEQGETAFFDANMKQEIFDGVFKVYRKVTKDKLMDFLEKEFDEFRIVDLTGLDKENKAFNASYGTYHDLRKILDKDFLDNSKNEKILEDIVLTLTLFEDREMIRKRLKNYSDLLTKEQLKKLERRHYTGWGRLSAELIHGIRNKESRKTILDYLIDDGNSNRNFMQLINDDALSFKEEIAKAQVIGETDNLNQVVSDIAGSPAIKKGILQSLKIVDELVKIMGHQPENIVVEMARENQFTNQGRRNSQQRLKGLTDSIKEFGSQILKEHPVENSQLQNDRLFLYYLQNGRDMYTGEELDIDYLSQYDIDHIIPQAFIKDNSIDNRVLTSSKENRGKSDDVPSKDVVRKMKPYWSKLLSAKLITQRKFDNLTKAERGGLTDDDKAGFIKRQLVETRQITKHVARILDERFNTETDENNKKIRQVKIVTLKSNLVSNFRKEFELYKVREINDYHHAHDAYLNAVIGKALLGVYPQLEPEFVYGDYPHFHGHEENKATAKKFFYSNIMNFFKKDDVRTDKNGEIIWKKDEHISNIKKVLSYPQVNIVKKVEEQTGGFSKESILPKGNSDKLIPRKTKKFYWDTKKYGGFDSPIVAYSILVIADIEKGKSKKLKTVKALVGVTIMEKMTFERDPVAFLERKGYRNVQEENIIKLPKYSLFKLENGRKRLLASARELQKGNEIVLPNHLGTLLYHAKNIHKVDEPKHLDYVDKHKDEFKELLDVVSNFSKKYTLAEGNLEKIKELYAQNNGEDLKELASSFINLLTFTAIGAPATFKFFDKNIDRKRYTSTTEILNATLIHQSITGLYETRIDLSKLGGD

SEQ ID NO: 480 - protein, 1345 aa, Streptococcus mutans 5SM3; identical to SEQ ID NO: 479

SEQ ID NO: 481 - protein, 1359 aa, Streptococcus mutans 66-2A
MKKPYSIGLDIGTNSVGWAVVTDDYKVPAKKMKVLGNTDKSHIKKNLLGALLFDSGNTAEDRRLKRTARRRYTRRRNRILYLQEIFAEEMMQVDESFFQRLDDSFLVEEDKRGSRYPIFGTLKEEKKYHKEFKTIYHLREKLANSTEKADLRLVYLSLAHMIKFRGHFLIEGQLKAENTNVQALFKDFVEVYDKTVEESHLSEMTVDALSILTEKVSKSRRLENLVECYPTEKKNTLFGNLIALSLGLQPNFKTNFQLSEDAKLQFSKDTYEEDLEGLLGEIGDEYADLFASAKNLYDAILLSGILAVDDNTTKAPLSASMVKRYKEHKEELAAFKRFIKEKLPKKYEEIFKDDTKNGYAGYVGADKKLRKRSGKLATEEEFYKYVKGILNKVEGADVWLDKIDREDFLRKQRTFDNGSIPHQIHLQEMHAILRRQGEHYPFLKENQDKIEKILTFRIPYYVGPLVRKGSRFAWAEYKADEKITPWNFDDILDKEKSAEKFITRMTLNDLYLPEEKVLPKHSLLYETFTVYNELTKVKYVNEQGEAKFFDANMKQEIFDHVFKENRKVTKDKLLNYLNKEFEEFRIVNLTGLDKENKVFNSSLGTYHDLRKILNKSFLDNKENEQIIEDIIQTLTLFEDREMIRQRLQKYSDIFTKAQLKKLERRHYTGWGRLSYKLINGIRDKQSNKTILGYLIDDGYSNRNFMQLINDDALSFKEEIAKAQVIGEMDGLNQVVSDIAGSPAIKKGILQSLKIVDELVKVMGHNPANIVIEMARENQTTAKGRRSSQKRYKRLEEAIKNLDHDLNHKILKEHPTDNQALQNDRLFLYYLQNGRDMYTEDPLDINRLSDYDIDHIIPQAFIKDNSIDNRVLTRSDKNRGKSDDVPSEEVVHKMKPFWSKLLSAKLITQRKFDNLTKAERGGLTDDDKAGFIKRQLVETRQITKHVARILDERFNTETDENNKKIRQVKIVTLKSNLVSNFRKEFELYKVREINDYHHAHDAYLNAVIGKALLGVYPQLEPEFVYGDYPHFHGHKENKATAKKFFYSNIMNFFKKGDVRTDKNGEIIWKKDEHISNIKKVLSYPQVNIVKKVEEQTGGFSKESILPKGNSDKLIPRKTKKFYWDTKKYGGFDSPIVAYSILVIADIEKGKSKKLKTVKALVGVTIMEKMTFERDPVAFLERKGYRNVQEENIIKLPKYSLFKLENGRKRLLASARELQKGNEIVLPNHLETLLYHAKNIHKVDEPKHLDYVDKHKDEFKELLDVVSNFSKKYTLAEGNLEKIKELYAQNNGEDLKELASSFINLLTFTAIGAPAAFKFFDKNIDRKRYTSTTEILNATLIHQSITGLYETRIDLNKLGGD

SEQ ID NO: 482 - protein, 1359 aa, Streptococcus mutans 66-2A; identical to SEQ ID NO: 481

SEQ ID NO: 483 - protein, 1345 aa, Streptococcus mutans 8ID3
MKKPYSIGLDIGTNSVGWAVVTDDYKVPAKKMKVLGNTDKSHIEKNLLGALLFDSGNTAEDRRLKRTARRRYTRRRNRILYLQEIFSEEMGKVDDSFFHRLEDSFLVTEDKRGERHPIFGNLEEEVKYHENFPTIYHLRQYLADNPEKVDLRLVYLALAHIIKFRGHFLIEGKFDTRNNDVQRLFQEFLAVYDNTFENSSLQEQNVQVEEILTDKISKSAKKDRVLKLFPNEKSNGRFAEFLKLIVGNQADFKKHFELEEKAPLQFSKDTYEEELEVLLAQIGDNYAELFLSAKKLYDSILLSGILTVTDVGTKAPLSASMIQRYNEHQMDLAQLKQFIRQKLSDKYNEVFSDVSKDGYAGYIDGKTNQEAFYKYLKGLLNKIEGSGYFLDKIEREDFLRKQRTFDNGSIPHQIHLQEMRAIIRRQAEFYPFLADNQDRIEKLLTFRIPYYVGPLARGKSDFAWLSRKSADKITPWNFDEIVDKESSAEAFINRMTNYDLYLPNQKVLPKHSLLYEKFTVYNELIKVKYKTEQGKTAFFDANMKQEIFDGVFKVYRKVTKDKLMDFLEKEFDEFRIVDLTGLDKENKVFNASYGTYHDLCKILDKDFLDNSKNEKILEDIVLTLTLFEDREMIRKRLENYSDLLTKEQVKKLERRHYTGWGRLSAELIHGIRNKESRKTILDYLIDDGNSNRNFMQLINDDALSFKEEIAKAQVIGETDNLNQVVSDIAGSPAIKKGILQSLKIVDELVKIMGHQPENIVVEMARENQFTNQGRRNSQQRLKGLTDSIKEFGSQILKEHPVENSQLQNDRLFLYYLQNGRDMYTGEELDIDYLSQYDIDHIIPQAFIKDNSIDNRVLTSSKENRGKSDDVPSKDVVRKMKSYWSKLLSAKLITQRKFDNLTKAERGGLTDDDKAGFIKRQLVETRQITKHVARILDERFNTETDENNKKIRQVKIVTLKSNLVSNFRKEFELYKVREINDYHHAHDAYLNAVIGKALLGVYPQLEPEFVYGDYPHFHGHKENKATAKKFFYSNIMNFFKKDDVRTDKNGEIIWKKDEHISNIKKVLSYPQVNIVKKVEEQTGGFSKESILPKGNSDKLIPRKTKKFYWDTKKYGGFDSPIVAYSILVIADIEKGKSKKLKTVKALVGVTIMEKMTFERDPVAFLERKGYRNVQEENIIKLPKYSLFKLENGRKRLLASARELQKGNEIVLPNHLGTLLYHAKNIHKVDEPKHLDYVDKHKDEFKELLDVVSNFSKKYTLAEGNLEKIKELYAQNNGEDLKELASSFINLLTFTAIGAPATFKFFDKNIDRKRYTSTTEILNATLIHQSITGLYETRIDLNKLGGD

SEQ ID NO: 484 - protein, 1345 aa, Streptococcus mutans 8ID3; identical to SEQ ID NO: 483

SEQ ID NO: 485 - protein, 1345 aa, Streptococcus mutans A19
MKKPYSIGLDIGTNSVGWSVVTDDYKVPAKKMKVLGNTDKSHIEKNLLGALLFDSGNTAEDRRLKRTARRRYTRRRNRILYLQEIFSEEMGKVDDSFFHRLEDSFLVTEDKRGERHPIFGNLEEEVKYHENFPTIYHLRQYLADNPEKVDLRLVYLALAHIIKFRGHFLIEGKFDTRNNDVQRLFQEFLAVYDNTFENSSLQEQNVQVEEILTDKISKSAKKDRVLKLFPNEKSNGRFAEFLKLIVGNQADFKKHFELEEKAPLQFSKDTYEEELEVLLAQIGDNYAELFLSAKKLYDSILLSGILTVTDVGTKAPLSASMIQRYNEHQMDLAQLKQFIRQKLSDKYNEVFSDVSKDGYAGYIDGKTNQEAFYKYLKGLLNKIEGSGYFLDKIEREDFLRKQRTFDNGSIPHQIHLQEMRAIIRRQAEFYPFLADNQDRIEKLLTFRIPYYVGPLARGKSDFAWLSRKSADKITPWNFDEIVDKESSAEAFINRMTNYDLYLPNQKVLPKHSLLYEKFTVYNELTKVKYKTEQGKTAFFDANMKQEIFDGVFKVYRKVTKDKLMDFLEKEFDEFRIVDLTGLDKENKVFNASYGTYHDLCKILDKDFLDNSKNEKILEDIVLTLTLFEDREMIRKRLENYSDLLTKEQVKKLERRHYTGWGRLSAELIHGIRNKESRKTILDYLIDDGNSNRNFMQLINDDALSFKEEIAKAQVIGETDNLNQVVSDIAGSPAIKKGILQSLKIVDELVKIMGHQPENIVVEMARENQFTNQGRRNSQQRLKGLTDSIKEFGSQILKEHPVENSQLQNDRLFLYYLQNGRDMYTGEELDIDYLSQYDIDHIIPQAFIKDNSIDNRVLTSSKENRGKSDDVPSKDVVRKMKSYWSKLLSAKLITQRKFDNLTKAERGGLTDDDKAGFIKRQLVETRQITKHVARILDERFNTETDENNKKIRQVKIVTLKSNLVSNFRKEFELYKVREINDYHHAHDAYLNAVIGKALLGVYPQLEPEFVYGDYPHFHGHKENKATAKKFFYSNIMNFFKKDDVRIDKNGEIIWKKDEHISNIKKVLSYPQVNIVKKVEEQTGGFSKESILPKGNSDKLIPRKTKKFYWDTKKYGGFDSPIVAYSILVIADIEKGKSKKLKTVKALVGVTIMEKMTFERDPVAFLERKGYRNVQEENIIKLPKYSLFKLENGRKRLLASARELQKGNEIVLPNHLGTLLYHAKNIHKVDEPKHLDYVDKHKDEFKELLDVVSNFSKKYTLAEGNLEKIKELYAQNNGEDLKELASSFINLLTFTAIGAPATFKFFDKNIDRKRYTSTTEILNATLIHQSITGLYETRIDLSKLGGD

SEQ ID NO: 486 - protein, 1345 aa, Streptococcus mutans A19; identical to SEQ ID NO: 485

SEQ ID NO: 487 - protein, 1345 aa, Streptococcus mutans B; identical to SEQ ID NO: 464

SEQ ID NO: 488 - protein, 1345 aa, Streptococcus mutans G123; identical to SEQ ID NO: 464

SEQ ID NO: 489 - protein, 1345 aa, Streptococcus mutans
MKKPYSIGLDIGTNSVGWAVVTDDYKVPAKKMKVLGNTDKSHIKKNLLGALLFDSGNTAEDRRLKRTARRRYTRRRNRILYLQEIFSEEMGKVDDSFFHRLDESFLTDDDKNFDSHPIFGNKAEEDAYHQKFPTIYHLRKHLADSTEKADLRLVYLALAHMIKFRGHFLIEGELNAENTDVQKLFADFVGVYDRTFDDSHLSEITVDASSILTEKISKSRRLEKLINNYPKEKKNTLFGNLIALSLGLQPNFKTNFKLSEDAKLQFSKDTYEEELEVLLAQIGDNYAELFLSAKKLYDSILLSGILTVTDVSTKAPLSASMIQRYNEHQMDLAQLKQFIRQKLSDKYNEVFSDVSKDGYAGYIDGKTNQEAFYKYLKGLLNKIEGSGYFLDKIEREDFLRKQRTFDNGSIPHQIHLQEMRAIIRRQAEFYPFLADNQDRIEKILTFRIPYYVGPLARGKSDFAWLSRKSADKITPWNFDEIVDKESSVEAFINRMTNYDLYLPNQKVLPKHSLLYEKFTVYNELTKVKYKTEQGKTAFFDANMKQEIFDGVFKVYRKVTKDKLMDFLEKEFDEFRIVDLTGLDKENKAFNASYGTYHDLRKILDKDFLDNSKNEKILEDIVLTLTLFEDREMIRKRLKNYSDLLTKEQLKKLERRHYTGWGRLSAELIHGIRNKESRKTILDYLIDDGNSNRNFMQLINDDALSFKEEIAKAQVIGETDNLNQVVSDIAGSPAIKKGILQSLKIVDELVKIMGHQPENIVVEMARENQFTNQGRRNSQQRLKGLTDSIKEFGSQILKEHPVENSQLQNDRLFLYYLQNGRDMYTGEELDIDYLSQYDIDHIIPQAFIKDNSIDNRVLTSSKENRGKSDDVPSKDVVRKMKSYWSKLLSAKLITQRKFDNLTKGERGGLTDDDKAGFIKRQLVETRQITKHVARILDERFNTETDENNKKIRQVKIVTLKSNLVSNFRKEFELYKVREINDYHHAHDAYLNAVIGKALLGVYPQLEPEFVYGDYPHFHGHKENKATAKKFFYSNIMNFFKKDDVRTDKNGEIIWKKDEYISNIKKVLSYPQVNIVKKVEEQTGGFSKESILPKGDSDKLIPRKTKKFYWDTKKYGGFDSPIVAYSILVIADIEKGKSKKLKTVKALVGVTIMEKMTFERDPVAFLERKGYRNVQEENIIKLPKYSLFKLENGRKRLLASARELQKGNEIVLPNHLGTLLYHAKNIHKVDEPKHLDYVDKHKDEFKELLDVVSNFSKKYTLAEGNLEKIKELYAQNNGEDLKELASSFINLLTFTAIGAPATFKFFDKNIDRKRYTSTTEILNATLIHQSITGLYETRIDLSKLGGD

SEQ ID NO: 490 - protein, 1345 aa, Streptococcus mutans
MKKPYSIGLDIGTNSVGWAVVTDDYKVPDKKMKVLGNTDKSHIKKNLLGALLFDSGNTAEDRRLKRTARRRYTRRRNRILYLQEIFSEEMGKVDDSFFHRLEDSFLVTEDKRGERHPIFGNLEEEVKYHENFPTIYHLRQYLADNPEKTDLRLVYLALAHIIKFRGHFLIEGKFDTRNNDVQRLFQEFLAVYDNTFENSSLQEQNVQVEEILTDKISKSAKKDRVLKLFPNEKSNGRFAEFLKLIVGNQADFKKHFELEEKAPLQFSKDIYEEELEVLLAQIGDNYAELFLSAKKLYDSILLSGILTVTDVSTKAPLSASMIQRYNEHQMDLAQLKQFIRQKLSDKYNEVFSDVSKDGYAGYIDGKTNQEAFYKYLKGLLNKIEGSGYFLDKIEREDFLRKQRTFDNGSIPHQIHLQEMRAIIRRQAEFYPFLADNQDRIEKILTFRIPYYVGPLARGKSDFAWLSRKSADKITPWNFDEIVDKESSVEAFINRMTNYDLYLPNQKVLPKHSLLYEKFTVYNELTKVKYKTEQGKTAFFDANMKQEIFDGVFKVYRKVTKDKLMDFLEKEFDEFRIVDLTGLDKENKAFNASYGTYHDLRKILDKDFLDNSKNEKILEDIVLTLTLFEDREMIRKRLKNYSDLLTKEQLKKLERRHYTGWGRLSAELIHGIRNKESRKTILDYLIDDGNSNRNFMQLINDDALSFKEEIAKAQVIGETDNLNQVVSDIAGSPAIKKGILQSLKIVDELVKIMGHQPENIVVEMARENQFTNQGRRNSQQRLKGLTDSIKEFGSQILKEHPVENSQLQNDRLFLYYLQNGRDMYTGEELDIDYLSQYDIDHIIPQAFIKDNSIDNRVLTSSKENRGKSDDVPSKDVVRKMKSYWSKLLSAKLITQRKFDNLTKAERGGLTDDDKAGFIKRQLVETRQITKHVARILDERFYTETDENNKKIRQVKIVTLKSNLVSNFRKEFELYKVREINDYHHAHDAYLNAVIGKALLGVYPQLEPEFVYGDYPHFHGHKENKATAKKFFYSNIMNFFKKDDVRTDKNGEIIWKKDEHISNIKKVLSYPQVNIVKKVEEQTGGFSKESILPKGNSDKLIPRKTKKFYWDTKKYGGFDSPIVAYSILVIADIEKGKSKKLKTVKALVGVTIMEKMTFERDPVAFLERKGYRNVQEENIIKLPKYSLFKLENGRKRLLASARELQKGNEIVLPNHLGTLLYHAKNIHKVDEPKHLDYVDKHKDEFKELLDVVSNFSKKYTLAEGNLEKIKELYAQNNGEDLKELASSFINLLTFTAIGAPATFKFFDKNIDRKRYTSTTEILNATLIHQSITGLYETRIDLSKLGGD

SEQ ID NO: 491 - protein, 1345 aa, Streptococcus mutans M21
MKKPYSIGLDIGTNSVGWAVVTDDYKVPAKKMKVLGNTDKSHIKKNLLGALLFDSGNTAEDRRLKRTARRRYTRRRNRILYLQEIFSEEMGKVDDSFFHRLEDSFLVTEDKRGERHPIFGNLEEEVKYHENFPTIYHLRQYLADNPEKTDLRLVYLALAHIIKFRGHFLIEGKFDTRNNDVQRLFQEFLAVYDNTFENSSLQEQNVQVEEILTDKISKSAKKDRVLKLFPNEKSNGRFAEFLKLIVGNQADFKKHFELEEKAPLQFSKDIYEEELEVLLAQIGDNYAELFLSAKKLYDSILLSGILTVTDVSTKAPLSASMIQRYNEHQMDLAQLKQFIRQKLSDKYNEVFSDVSKDGYAGYIDGKTNQEAFYKYLKGLLNKIEGSGYFLDKIEREDFLRKQRTFDNGSIPHQIHLQEMRAIIRRQAEFYPFLADNQDRIEKILTFRIPYYVGPLARGKSDFAWLSRKSADKITPWNFDEIVDKESSVEAFINRMTNYDLYLPNQKVLPKHSLLYEKFTVYNELTKVKYKTEQGKTAFFDANMKQEIFDGVFKVYRKVTKDKLMDFLEKEFDEFRIVDLTGLDKENKAFNASYGTYHDLRKILDKDFLDNSKNEKILEDIVLTLTLFEDREMIRKRLKNYSDLLTKEQLKKLERRHYTGWGRLSAELIHGIRNKESRKTILDYLIDDGNSNRNFMQLINDDALSFKEEIAKAQVIGETDNLNQVVSDIAGSPAIKKGILQSLKIVDELVKIMGHQPENIVVEMARENQFTNQGRRNSQQRLKGLTDSIKEFGSQILKEHPVENSQLQNDRLFLYYLQNGRDMYTGEELDIDYLSQYDIDHIIPQAFIKDNSIDNRVLTSSKENRGKSDDVPSKNVVRKMKSYWSKLLSAKLITQRKFDNLTKAERGGLTDDDKAGFIKRQLVETRQITKHVARILDERFHTETDENNKKIRQVKIVTLKSNLVSNFRKEFELYKVREINDYHHAHDAYLNAVIGKALLGVYPQLEPEFVYGDYPHFHGHKENKATAKKFFYSNIMNFFKKDDVRTDKNGEIIWKKDEHISNIKKVLSYPQVNIVKKVEEQTGGFSKESILPKGNSDKLIPRKTKKFYWDTKKYGGFDSPIVAYSILVIADIEKGKSKKLKTVKALVGVTIMEKMTFERDPVAFLERKGYRNVQEENIIKLPKYSLFKLENGRKRLLASARELQKGNEIVLPNHLGTLLYHAKNIHKVDEPKHLDYVDKHKDEFKELLDVVSNFSKKYTLAEGNLEKIKELYAQNNGEDLKELASSFINLLTFTAIGAPATFKFFDKNIDRKRYTSTTEILNATLIHQSITGLYETRIDLSKLGGD

SEQ ID NO: 492 - protein, 1345 aa, Streptococcus mutans M21; identical to SEQ ID NO: 491

SEQ ID NO: 493 - protein, 1345 aa, Streptococcus mutans M230
MKKPYSIGLDIGTNSVGWAVVTDDYKVPAKKMKVLGNTDKSHIKKNLLGALLFDSGNTAEDRRLKRTARRRYTRRRNRILYLQEIFSEEMGKVDDSFFHRLEDSFLVTEDKRGERHPIFGNLEEEVKYHENFPTIYHLRQYLADNPEKVDLRLVYLALAHIIKFRGHFLIEGKFDTRNNDVQRLFQEFLAVYDNTFENSSLQEQNVQVEEILTDKISKSAKKDRVLKLFPNEKSNGRFAEFLKLIVGNQADFKKHFELEEKAPLQFSKDTYEEELEVLLAQIGDNYAELFLSAKKLYDSILLSGILTVTDVSTKAPLSASMIQRYNEHQMDLAQLKQFIRQKLSDKYNEVFSDVSKDGYAGYIDGKTNQEAFYKYLKGLLNKIEGSGYFLDKIEREDFLRKQRTFDNGSIPHQIHLQEMRAIIRRQAEFYPFLADNQDRIEKILTFRIPYYVGPLARGKSDFAWLSRKSADKITPWNFDEIVDKESSAEAFINRMTNYDLYLPNQKVLPKHSLLYEKFTVYNELTKVKYKTEQGKTAFFDANMKQEIFDGVFKVYRKVTKDKLMDFLEKEFDEFRIVDLTGLDKENKVFNASYGTYHDLCKILDKDFLDNSKNEKILEDIVLTLTLFEDREMIRKRLENYSDLLTKEQVKKLERRHYTGWGRLSAELIHGIRNKESRKTILDYLIDDGNSNRNFMQLINDDALSFKEEIAKAQVIGETDNLNQVVSDIAGSPAIKKGILQSLKIVDELVKIMGHQPENIVVEMARENQFTNQGRQNSQQRLKGLTDSIKEFGSQILKEHPVENSQLQNDRLFLYYLQNGRDMYTGEELDIDYLSQYDIDHIIPQAFIKDNSIDNRVLTSSKENRGKSDDVPSEDVVRKMKSYWSKLLSAKLITQRKFDNLTKAERGGLTDDDKAGFIKRQLVETRQITKHVARILDERFYTETDENNKKIRQVKIVTLKSNLVSNFRKEFELYKVREINDYHHAHDAYLNAVIGKALLGVYPQLEPEFVYGDYPHFHGHKENKATAKKFFYSNIMNFFKKDDVRTDKNGEIIWKKDEHISNIKKVLSYPQVNIVKKVEEQTGGFSKESILPKGNSDKLIPRKTKKFYWDTKKYGGFDSPIVAYSILVIADIEKGKSKKLKTVKALVGVTIMEKMTFERDPVAFLERKGYRNVQEENIIKLPKYSLFKLENGRKRLLASARELQKGNEIVLPNHLGTLLYHAKNIHKVDEPKHLDYVDKHKDEFKELLDVVSNFSKKYTLAEGNLEKIKELYAQNNGEDLKELASSFINLLTFTAIGAPATFKFFDKNIDRKRYTSTTEILNATLIHQSITGLYETRIDLSKLGGD

SEQ ID NO: 494 - protein, 1345 aa, Streptococcus mutans M230; identical to SEQ ID NO: 493

SEQ ID NO: 495 - protein, 1345 aa, Streptococcus mutans M2A
MKKPYSIGLDIGTNSVGWAVVTDDYKVPAKKMKVLGNTDKSHIKKNLLGALLFDSGNTAEDRRLKRTARRRYTRRRNRILYLQEIFSEEMGKVDDSFFHRLEDSFLVTEDKRGERHPIFGNLEEEVKYHENFPTIYHLRQYLADNPEKTDLRLVYLALAHIIKFRGHFLIEGKFDTRNNDVQRLFQEFLAVYDNTFENSSLQEQNVQVEEILTDKISKSAKKDRVLKLFPNEKSNGRFAEFLKLIVGNQADFKKHFELEEKAPLQFSKDIYEEELEVLLAQIGDNYAELFLSAKKLYDSILLSGILTVTDVSTKAPLSASMIQRYNEHQMDLAQLKQFIRQKLSDKYNEVFSDVSKDGYAGYIDGKTNQEAFYKYLKGLLNKIEGSGYFLDKIEREDFLRKQRTFDNGSIPHQIHLQEMRAIIRRQAEFYPFLADNQDRIEKILTFRIPYYVGPLARGKSDFAWLSRKSADKITPWNFDEIVDKESSVEAFINRMTNYDLYLPNQKVLPKHSLLYEKFTVYNELTKVKYKTEQGKTAFFDANMKQEIFDGVFKVYRKVTKDKLMDFLEKEFDEFRIVDLTGLDKENKAFNASYGTYHDLRKILDKDFLDNSKNEKILEDIVLTLTLFEDREMIRKRLKNYSDLLTKEQLKKLERRHYTGWGRLSAELIHGIRNKESRKTILDYLIDDGNSNRNFMQLINDDALSFKEEIAKAQVIGETDNLNQVVSDIAGSPAIKKGILQSLKIVDELVKIMGHQPENIVVEMARENQFTNQGRRNSQQRLKGLTDSIKEFGSQILKEHPVENSQLQNDRLFLYYLQNGRDMYTGEELDIDYLSQYDIDHIIPQAFIKDNSIDNRVLTSSKENRGKSDDVPSKDVVRKMKSYWSKLLSAKLITQRKFDNLTKAERGGLTDDDKAGFIKRQLVETRQITKHVARILDERFNTETDENNKKIRQVKIVTLKSNLVSNFRKEFELYKVREINDYHHAHDAYLNAVIGKALLGVYPQLEPEFVYGDYPHFHGHKENKATAKKFFYSNIMNFFKKDDVRTDKNGEIIWKKDEHISNIKKVLSYPQVNIVKKVEEQTGGFSKESILPKGNSYKLIPRKTKKFYWDTKKYGGFDSPIVAYSILVIADIEKGKSKKLKTVKALVGVTIMEKMTFERDPVAFLERKGYRNVQEENIIKLPKYSLFKLENGRKRLLASARELQKGNEIVLPNHLGTLLYHAKNIHKVDEPKHLDYVDKHKDEFKELLDVVSNFSKKYTLAEGNLEKIKELYAQNNGEDLKELASSFINLLTFTAIGAPAAFKFFDKNIDRKRYTSTTEILNATLIHQSITGLYETRIDLSKLGGD

SEQ ID NO: 496 - protein, 1345 aa, Streptococcus mutans M2A; identical to SEQ ID NO: 495

SEQ ID NO: 497 - protein, 1345 aa, Streptococcus mutans N29
MKKPYSIGLDIGTNSVGWAVVTDDYKVPAKKMKVLGNTDKSHIKKNLLGALLFDSGNTAADRRLKRTARRRYTRRRNRILYLQEIFAEEMSKVDDSFFHRLEDSFLVTEDKRGERHPIFGNLEEEVKYHENFPTIYHLRQYLADNPEKVDLRLVYLALAHIIKFRGHFLIEGKFDTRNNDVQRLFQEFLAVYDNTFENSSLQEQNVQVEEILTDKISKSAKKDRVLKLFPNEKSNGRFAEFLKLIVGNQADFKKHFELEEKAPLQFSKDTYEEELEVLLAQIGDNYAELFLSAKKLYDSILLSGILTVTDVSTKAPLSASMIQRYNEHQMDLAQLKQFIRQKLSDKYNEVFSDVSKDGYAGYIDGKTNQEAFYKYLKGLLNKIEGSGYFLDKIEREDFLRKQRTFDNGSIPHQIHLQEMRAIIRRQAEFYPFLADNQDRIEKILTFRIPYYVGPLARGKSDFAWLSRKSADKITPWNFDEIVDKESSAEAFINRMTNYDLYLPNQKVLPKHSLLYEKFTVYNELTKVKYKTEQGKTAFFDANMKQEIFDGVFKVYRKVTKDKLMDFLEKEFDEFRIVDLTGLDKENKAFNASYGTYHDLRKILDKDFLDNSKNEKILEDIVLTLTLFEDREMIRKRLENYSDLLTKEQVKKLERRHYTGWGRLSAELIHGIRNKESRKTILDYLIDDGNSNRNFMQLINDDALSFKEEIAKAQVIGETDNLNQVVSDIAGSPAIKKGILQSLKIVDELVKIMGHQPENIVVEMARENQFTNQGRRNSQQRLKGLTDSIKEFGSQILKEHPVENSQLQNDRLFLYYLQNGRDMYTGEELDIDYLSQYDIDHIIPQAFIKDNSIDNRVLTSSKENRGKSDDVPSKNVVRKMKSYWSKLLSAKLITQRKFDNLTKAERGGLTDDDKAGFIKRQLVETRQITKHVARILDERFHTETDENNKKIRQVKIVTLKSNLVSNFRKEFELYKVREINDYHHAHDAYLNAVIGKALLGVYPQLEPEFVYGDYPHFHGHKENKATAKKFFYSNIMNFFKKDDVRTDKNGEIIWKKDEHISNIKKVLSYPQVNIVKKVEEQTGGFSKESILPKGNSDKLIPRKTKKFYWDTKKYGGFDSPIVAYSILVIADIEKGKSKKLKTVKALVGVTIMEKMTFERDPVAFLERKGYRNVQEENIIKLPKYSLFKLENGRKRLLASARELQKGNEIVLPNHLGTLLYHAKNIHKVDEPKHLDYVDKHKDEFKELLDVVSNFSKKYTLAEGNLEKIKELYAQNNGEDLKELSSSFINLLTFTAIGAPAAFKFFDKNIDRKRYTSTTEILNATLIHQSITGLYETRIDLSKLGGD

SEQ ID NO: 498 - protein, 1345 aa, Streptococcus mutans N29; identical to SEQ ID NO: 497

SEQ ID NO: 499 - protein, 1345 aa, Streptococcus mutans N3209
MKKPYSIGLDIGTNSVGWAVVTDDYKVPAKKMKVLGNTDKSHIKKNLLGALLFDSGNTAEDRRLKRTTRRRYTRRRNRILYLQEIFSEEMGKVDDSFFHRLEDSFLVTEDKRGERHPIFGNLEEEVKYHENFPTIYHLRQYLADNPEKTDLRLVYLALAHIIKFRGHFLIEGKFDTRNNDVQRLFQEFLAVYDNTFENSSLQEQNVQVEEILTDKISKSAKKDRVLKLFPNEKSNGCFAEFLKLIVGNQADFKKHFELEEKAPLQFSKDTYEEELEVLLAQIGDNYAELFLSAKKLYDSILLSGILTVTDVSTKAPLSASMIQRYNEHQMDLTQLKQFIRQKLSDKYNEVFSDVSKDGYAGYIDGKTNQEAFYKYLKGLLNKIEGSGYFLDKIEREDFLRKQRTFDNGSIPHQIHLQEMRAIIRRQAEFYPFLADNQDRIEKLLTFRIPYYVGPLASGKSDFAWLSRKSADKITPWNFDEIVDKESSAEAFINRMTNYDLYLPNQKVLPKHSLLYEKFTVYNELTKVKYKTEQGKTAFFDANMKQEIFDGVFKVYRKVTKDKLMDFLEKEFDEFRIVDLTGLDKENKVFNASYGTYHDLCKILDKDFLDNSKNEKILEDIVLTLTLFEDREMIRKRLENYSDLLTKEQVKKLERRHYTGWGRLSAELIHGIRNKESRKTILDYLIDDGNSNRNFMQLINDDALSFKEEIAKAQVIGETDNLNQVVSDIAGSPAIKKGILQSLKIVDELVKIMGHQPENIVVEMARENQFTNQGRRNSQQRLKGLTDSIKEFGSQILKEHPVENSQLQNDRLFLYYLQNGRDMYTGEELDIDYLSQYDIDHIIPQAFIKDNSIDNRVLTSSKENRGKSDDVPSKDVVRKMKSYWSKLLSAKLITQRKFDNLTKAERGGLTDDDKAGFIKRQLVETRQITKHVARILDERFNTETDENNKKIRQVKIVTLKSNLVSNFRKEFELYKVREINDYHHAHDAYLNAVIGKALLGVYPQLEPEFVYGDYPHFHGHKENKATAKKFFYSNIMNFFKKDDVRTDKNGEIIWKKDEHISNIKKVLSYPQVNIVKKVEEQTGGFSKESILPKGNSDKLIPRKTKKFYWDTKKYGGFDSPIVAYSILVIADIEKGKSKKLKTVKALVGVTIMEKMTFERDPVAFLERKGYRNVQEENIIKLPKYSLFKLENGRKRLLASARELQKGNEIVLPNHLGTLLYHAKNIHKVDEPKHLDYVDKHKDEFKELLDVVSNFSKKYTLAEGNLEKIKELYAQNNGEDLKELASSFINLLTFTAIGAPATFKFFDKNIDRKRYTSTTEILNATLIHQSITGLYETRIDLSKLGGD

SEQ ID NO: 500 - protein, 1345 aa, Streptococcus mutans N3209; identical to SEQ ID NO: 499

SEQ ID NO: 501 - protein, 1345 aa, Streptococcus mutans N66
MKKPYSIGLDIGTNSVGWAVVTDDYKVPAKKMKVLGNTDKSHIKKNLLGALLFDSGNTAEDRRLKRTARRRYTRRRNRILYLQEIFSEEMGKVDDSFFHRLEDSFLVTEDKRGERHPIFGNLEEEVKYHENFPTIYHLRQYLADNPEKTDLRLVYLALAHIIKFRGHFLIEGKFDTRNNDVQRLFQEFLAVYDNTFENSSLQEQNVQVEEILTDKISKSAKKDRVLKLFPNEKSNGRFAEFLKLIVGNQADFKKHFELEEKAPLQFSKDIYEEELEVLLAQIGDNYAELFLSAKKLYDSILLSGILTVTDVSTKAPLSASMIQRYNEHQMDLAQLKQFIRQKLSDKYNEVFSDVSKDGYAGYIDGKTNQEAFYKYLKGLLNKIEGSGYFLDKIEREDFLRKQRTFDNGSIPHQIHLQEMRAIIRRQAEFYPFLADNQDRIEKILTFRIPYYVGPLARGKSDFAWLSRKSADKITPWNFDEIVDKESSAEAFINRMTNYDLYLPNQKVLPKHSLLYEKFTVYNELTKVKYKTEQGKTAFFDANMKQEIFDGVFKVYRKVTKDKLMDFLEKEFDEFRIVDLTGLDKENKAFNASYGTYHDLRKILDKDFLDNSKNEKILEDIVLTLTLFEDREMIRKRLKNYSDLLTKEQLKKLERRHYTGWGRLSAELIHGIRNKESRKTILDYLIDDGNSNRNFMQLINDDALSFKEEIAKAQVIGETDNLNQVVSDIAGSLAIKKGILQSLKIVDELVKIMGHQPENIVVEMARENQFTNQGRRNSQQRLKGLTDSIKEFGSQILKEHPVENSQLQNDRLFLYYLQNGRDMYTGEELDIDYLSQYDIDHIIPQAFIKDNSIDNRVLTSSKENRGKSDDVPSKDVVRKMKSYWSKLLSAKLITQRKFDNLTKGERGGLTDDDKAGFIKRQLVETRQITKHVARILDERFNTETDENNKKIRQVKIVTLKSNLVSNFRKEFELYKVREINDYHHAHDAYLNAVIGKALLGVYPQLEPEFVYGDYPHFHGHKENKATAKKFFYSNIMNFFKKDDVRTDKNGEIIWKKDEYISNIKKVLSYPQVNIVKKVEEQTGGFFKESILPKGDSDKLIPRKTKKFYWDTKKYGGFDSPIVAYSILVIADIEKGKSKKLKTVKALVGVTIMEKMTFERDPVAFLERKGYRNVQEENIIKLPKYSLFKLENGRKRLLASARELQKGNEIVLPNHLGTLLYHAKNIHKVDEPKHLDYVDKHKDEFKELLDVVSNFSKKYTLAEGNLEKIKELYAQNNGEDLKELASSFINLLTFTAIGAPATFKFFDKNIDRKRYTSTTEILNATLIHQSITGLYETRIDLSKLGGD

SEQ ID NO: 502 - protein, 1345 aa, Streptococcus mutans N66; identical to SEQ ID NO: 501

SEQ ID NO: 503 - protein, 1350 aa, Streptococcus mutans NFSM1
MKKPYSIGLDIGTNSVGWAVVTDDYKVPAKKMTVLGNTDKSHIKKNLLGALLFDSGNTAADRRLKRTARRRYTRRRNRILYLQEIFAEEMSKVDDSFFHRLEDSFLVTEDKRGERHPIFGNLEEEVKYHENFPTIYHLRQYLADNPEKVDLRLVYLALAHIIKFRGHFLIEGKFDTRNNDVQRLFQEFLAVYDNTFENSSLQEQNVQVEEILTDKISKSAKKDRVLKLFPNEKSNGRFAEFLKLIVGNQADFKKHFELEEKTPLQFSKDTYEEELEVLLAQIGDNYAELFLSAKKLYDSILLSGILTVTDVSTKAPLSASMIQRYNEHQMDLAQLKQFIRQKLSDKYNEVFSDVSKDGYAGYIDGKTNQEAFYKYLKGLLNKIEGSGYFLDKIEREDFLRKQRTFDNGSIPHQIHLQEMRAIIRRQAEFYPFLADNQDRIEKILTFRIPYYVGPLARGKSDFAWLSRKSADKITPWNFDEIVDKESSAEAFINRMTNYDLYLPNQKVLPKHSLLYEKFTVYNELTKVKYKTEQGKTAFFDANMKQEIFDGVFKVYRKVTKDKLMDFLEKEFDEFRIVDLTGLDKENKAFNASYGTYHDLRKILDKDFLDNSKNEKILEDIVLTLTLFEDREMIRKRLENYSDLLTKEQVKKLERRHYTGWGRLSAELIHGIRNKESRKTILDYLIDDGNSNRNFMQLINDDALSFKEEIAKAQVIGETDNLNQVVSDIAGSPAIKKGILQSLKIVDELVKIMGHQPENIVVEMARENQFTNQGRRNSQQRLKGLTDSIKEFGSQILKEHPVENSQLQNDRLFLYYLQNGRDMYTGEELDIDYLSQYDIDHIIPQAFIKDNSIDNRVLTSSKENRGKSDDVPSEDVVNRMRPFWNKLLSSGLISQRKYNNLTKKELTPDDKAGFIKRQLVETRQITKHVARMLDERFNKEFDDNNKRIRRVKIVTLKSNLVSSFRKEFELYKVREINDYHHAHDAYLNAVVVKALLVKYPKLEPEFVYGEYPKYNSYRERKTATQKMFFYSNIMNMFKSKVKLADDQIVERPMIEVNDETGEIAWDKTKHITTVKKVLSYPQVNIVKKVEEQTIGQNGGLFDDNPKSPLEVIPSKLVPLKKALNPEKYGGYQKPTTAYPILLIVDTKQLIPISVMDKKRFEQNPVKFLKDKGYQQIEKNNFVKLPKYTLVDIGNGIKRLWASSKEVHKGNQLVVSKKSQDLLYHAHHLDNDYSNEYVKNHYQQFDILFNEITSFSKKCKLGKEHIQKIEEAYSKERDSASIEELADGFIKLLGFTQLGATSPFSFLGIKLNQKQYTGKKDYLLPCMEATLIHQSITGLYETRIDLSKLGGD

SEQ ID NO: 504 - protein, 1350 aa, Streptococcus mutans NFSM1; identical to SEQ ID NO: 503

SEQ ID NO: 505 - protein, 1345 aa, Streptococcus mutans NLML1; identical to SEQ ID NO: 477

SEQ ID NO: 506 - protein, 1338 aa, Streptococcus mutans NLML4
MDLIGTNSVGWAVVTDDYKVPAKKMKVLGNTDKSHIKKNLLGALLFDSGNTAADRRLKRTARRRYTRRRNRILYLQEIFAEEMSKVDDSFFHRLEDSFLVTEDKRGERHPIFGNLEEEVKYHENFPTIYHLRQYLADNPEKVDLRLVYLALAHIIKFRGHFLIEGKFDTRNNDVQRLFQEFLAVYDNTFENSSLQEQNVQVEEILTDKISKSAKKDRVLKLFPNEKSNGRFAEFLKLIVGNQADFKKHFELEEKAPLQFSKDTYEEELEVLLAQIGDNYAELFLSAKKLYDSILLSGILTVTDVSTKAPLSASMIQRYNEHQMDLAQLKQFIRQKLSDKYNEVFSDVSKDGYAGYIDGKTNQEAFYKYLKGLLNKIEGSGYFLDKIEREDFLRKQRTFDNGSIPHQIHLQEMRAIIRRQAEFYPFLADNQDRIEKILTFRIPYYVGPLARGKSDFAWLSRKSADKITPWNFDEIVDKESSAEAFINRMTNYDLYLPNQKVLPKHSLLYEKFTVYNELTKVKYKTEQGKTAFFDANMKQEIFDGVFKVYRKVTKDKLMDFLEKEFDEFRIVDLTGLDKENKAFNASYGTYHDLRKILDKDFLDNSKNEKILEDIVLTLTLFEDREMIRKRLENYSDLLTKEQVKKLERRHYTGWGRLSAELIHGIRNKESRKTILDYLIDDGNSNRNFMQLINDDALSFKEEIAKAQVIGETDNLNQVVSDIAGSPAIKKGILQSLKIVDELVKIMGHQPENIVVEMARENQFTNQGRRNSQQRLKGLTDSIKEFGSQILKEHPVEHSQLQNDRLFLYYLQNGRDMYTGEELDIDYLSQYDIDHIIPQAFIKDNSIDNRVLTSSKENRGKSDDVPSKNVVRKMKSYWSKLLSAKLITQRKFDNLTKAERGGLTDDDKAGFIKRQLVETRQITKHVARILDERFHTETDENNKKIRQVKIVTLKSNLVSNFRKEFELYKVREINDYHHAHDAYLNAVIGKALLGVYPQLEPEFVYGDYPHFHGHKENKATAKKFFYSNIMNFFKKDDVRTDKNGEIIWKKDEHISNIKKVLSYPQVNIVKKVEEQTGGFSKESILPKGNSDKLIPRKTKKFYWDTKKYGGFDSPIVAYSILVIADIEKGKSKKLKTVKALVGVTIMEKMTFERDPVAFLERKGYRNVQEENIIKLPKYSLFKLENGRKRLLASARELQKGNEIVLPNHLGTLLYHAKNIHKVDEPKHLDYVDKHKDEFKELLDVVSNFSKKYTLAEGNLEKIKELYAQNNGEDLKELASSFINLLTFTAIGAPATFKFFDKNIDRKRYTSTTEILNATLIHQSITGLYETRIDLSKLGGD

SEQ ID NO: 507 - protein, 1338 aa, Streptococcus mutans NLML4; identical to SEQ ID NO: 506

SEQ ID NO: 508 - protein, 1128 aa, Streptococcus mutans NLML5
MANSKILGLDIGIASVGVGIIDKETGKIIHVNSRIFPAATADSNVERRGFRQGRRLVRRKKHRKVRLADLFLDSNLLTDFSKVSLNLNPYQLRVKGLNEELSNEELFIALKSIVSRRGISYLDDASEDSGANSSEYGKAVEENRKLLEDRTPGQIQLERFEKYGKVRGDFTVVENGENHRLINVFSTSAYKKEAERILRRQQEFNIRIADEFIEAYLTILTGKRKYYHGPGNEKSRTDYGRFRTDGTTLDNIFGILIGKCTFYPDEYRAAKASYTAQEFNLLNDLNNLTVPTETKKLSEEQKRQIIEHAKTVKTLGAPTLLKYIAKLVGCSADDIKGYRIDKSDKPEIHTFEAYRKMRTMELIKVADLSRESLDALAHILTLNTEREGIEEAIRDRFTNKEFNQEQINELVLFRKNNSSLFGKGWHNFSLKLMKELIPELYETSEEQMTILTRLGKQRVKKSSNRTNYIDEKELTEEIYNPVVAKSVRQAIKIINLATKKYGVFDNIVIEMARESNEDDEKKAIQNAQKANEDEKEAALLKAAHQFNGKEELPDSIFHGHKELLTKIRLWHQQGEKCLYTGKTIFINDLIHNPYKYEIDHILPLSLSFDDSLANKVLVLSTANQEKGQRTPFQSLDSMDGAWTYREFKAYVKGLKTLSNKKKDYLLNEEDINKNEVKQKFIERNLVDTRYSSRVVLNTLQDFYKKREFDTKISVVRGQFTSQIRRKWRIEKTRETYHHHAVDALIIAASSQLNLWKKQNNPLISYKEDQFVDPETGEILSLSDDEYKELVFKAPYDHFVDTLKSKKFEDSILFSYQVDSKYNRKISDATIYGTRKARLGKDSQEETYVLGKIKDIYSQKGYEDFIKKYKKDKTQFLMYHKDPQTFEKVIEEILKTYSDKELNEKGKEVPCNPFEKYRQENGPVRKYSKKGNGPEIKSIKYYDNKLGNHIDITPNNSHHQVVLQSLKPWRTDVYFNPKSGKYELMGLKYSDLRFEKVSGDYGISVKKYNEIKSKEGVDENSEFKFTLYKNDLILIKDTESGEQELFRFLSRTMPNQKHYVELKPYDKSKFEGHQKLMDIFGEVAKGGQCLKGLNKSNISIYKVKTDVLGNKYFIKKEGDQPQLNFKKKI

SEQ ID NO: 509 - protein, 1128 aa, Streptococcus mutans NLML5; identical to SEQ ID NO: 508

SEQ ID NO: 510 - protein, 1125 aa, Streptococcus mutans NLML8
MTNGKILGLDIGIASVGVGIINAKTGNVEHASSRIFPAANADNNVERRSARGGRRLIRRKKHRLKRVEDLFEKYNIDTDFSNLNLNPYQLRVKGLNEQLSNEELFAILKNIAKRRGISYLDDAEDDSVGSSDYAKAIDENRKLLKKQTPGEIQLKRLEKYGQLRGNFTIQDENGEYHRLINVFSTSDYVKEARRILETQSYYNKFITESFVEDYIKILQGKRKYYVGPGNEKSRTDYGIYRTDGETLDNLFGILIGKCGFYPEEYRAAKASYTAQEYNFLNDLNNLTVPTETKKLSTEQKYQLVDFAKTASTLEAAKLLKEIAKLVGCQVEEIKGYRLDNKDKPDLHTFEPFRKLKSNLTTIAVENLSITTLDTLAHILTLNTEREGIEEAIQKELPNIFSDEQITGIIAVRKKNSQIFGKGWHSFSIKLMKELIPELYETSEEQMTILIRLKKVKTNSKITNRTKYINEQEVTDEIYNPVVSKSIRQTVKIINAAIKKYGAFDQIVIEMPRESNEEDERKFIADLQKSNAKEKDDAMKQAALLYNGKAELPHGVFHGHKELATKIRLWYQQGERCLYSGKHIDIHDLIHNQHMFEIDHVLPLSLSFDDSLANKVLVYSWANQEKGQRTPFQALPQMASAWSFRELRDYISKQKGISKKKRDYLLTEQDINKVEVKQKFIERNLVDTRYVSRVVLNTLQDALKVMNKETKISVIRGQFTSQLRRQWRIDKSRETYHHHAVDALIIAASSQLRLWKKQNNPMFAEDKHGQKINLDTGEVLSDDAYKELVYQAPYQGFVNTISSKSFEDEILFSYQVDSKVNRKISDATIYATRQAQLGKDKKEETYVLGKIKDIYSQAGYDAFRKKYDKDKAVFLMYQKDPETWEKVIEVILRDYKELDDKGKEIGNPFERYKVKHGFVRKYSRKNKGTEIKSLKYYDNKLGNHIDITPNNSKHSVVLQSINPWRADLYFNPETTKYELMGLKYADLSFEKGTGKYSISREKYDEIKEREGISSKSEFKFTLYKNDLILVKDIGNHKELIARFNSKNDTSKHYVELKPWNKAKFDSEEELIPAFGKVAKSGQFIKGLNKPDLSIYKVKTDILGHKYYIKKEGDKPKLNFENKIKNK

SEQ ID NO: 511 - protein, 1125 aa, Streptococcus mutans NLML8; identical to SEQ ID NO: 510

SEQ ID NO: 512 - protein, 1345 aa, Streptococcus mutans NLML9
MKKPYSIGLDIGTNSVGWAVVTDDYKVSAKKMKVLGNTDKSHIKKNLLGALLFDSGNTAEDRRLKRTARRRYTRRRNRILYLQEIFAEEMSKVDDSFFHRLEDSFLVTEDKRGERHPIFGNLEEEVKYHENFPTIYHLRQYLADNPEKVDLRLVYLALAHIIKFRGHFLIEGKFDTRNNDVQRLFQEFLAVYDNTFENSSLQEQNVQVEEILTDKISKSAKKDRVLKLFPNEKSNGRFAEFLKLIVGNQADFKKHFELEEKAPLQFSKDTYEEELEVLLAQIGDNYAELFLSAKKLYDSILLSGILTVTDVSTKAPLSASMIQRYNEHQMDLAQLKQFIRQKLSDKYNEVFSDVSKDGYAGYIDGKTNQEAFYKYLKGLLNKIEGSGYFLDKIEREDFLRKQRTFDNGSIPHQIHLQEMRAIIRRQAEFYPFLADNQDRIEKILTFRIPYYVGPLARGKSDFAWLSRKSADKITPWNFDEIVDKESSAEAFINRMTNYDLYLPNQKVLPKHSLLYEKFTVYNELTKVKYKTEQGKTAFFDANMKQEIFDGVFKVYRKVTKDKLMDFLEKEFDEFRIVDLTGLDKENKAFNASYGTYHDLRKILDKDFLDNSKNEKILEDIVLTLTLFEDREMIRKRLENYSDLLTKEQVKKLERRHYTGWGRLSAELIHGIRNKESRKTILDYLIDDGNSNRNFMQLINDDALSFKEEIAKAQVIGETDNLNQVVSDIAGSPAIKKGILQSLKIVDELVKIMGHQPENIVVEMARENQFTNQGRRNSQQRLKGLTDSIKEFGSQILKEHPVEHSQLQNDRLFLYYLQNGRDMYTGEELDIDYLSQYDIDHIIPQAFIKDNSIDNRVLTSSKENRGKSDDVPSKNVVRKMKSYWSKLLSAKLITQRKFDNLTKAERGGLTDDDKAGFIKRQLVETRQITKHVARILDERFHTETDENNKKIRQVKIVTLKSNLVSNFRKEFELYKVREINDYHHTHDAYLNAVIGKALLGVYPQLEPEFVYGDYPHFHGHKENKATAKKFFYSNIMNFFKKDDVRTDKNGEIIWKKDEHISNIKKVLSYPQVNIVKKVEEQTGGFSKESILPKGNSDKLIPRKTKKFYWDTKKYGGFDSPIVAYSILVIADIEKGKSKKLKTVKALVGVTIMEKMTFERDPVAFLERKGYRNVQEENIIKLPKYSLFKLENGRKRLLASARELQKGNEIVLPNHLGTLLYHAKNIHKVDEPKHLDYVDKHKDEFKELLDVVSNFSKKYTLAEGNLEKIKELYAQNNGEDLKELASSFINLLTFTAIGAPATFKFFDKNIDRKRYTSTTEILNATLIHQSITGLYETRIDLSKLGGD

SEQ ID NO: 513 - protein, 1345 aa, Streptococcus mutans NLML9; identical to SEQ ID NO: 512

SEQ ID NO: 514 - protein, 1355 aa, Streptococcus mutans NMT4863
MKKPYSIGLDIGTNSVGWAVVTDDYKVPAKKMKVLGNTDKSHIKKNLLGALLFDSGNTAEDRRLKRTARRRYTRRRNRILYLQEIFAEEMSKVDDSFFHRLDESFLTDDDKNFDSHPIFGNKAEEDAYHQKFPTIYHLRKHLADSTEKADLRLVYLALAHMIKFRGHFLIEGELNAENTDVQKLFADFVGVYDRTFDDSHLSEITVDASSILTEKISKSRRLEKLINNYPKEKKNTLFGNLIALSLGLQPNFKTNFKLSEDAKLQFSKDTYEEDLEELLGKIGDDYADLFTLAKNLYDAILLSGILTADDSSTKAPLSASMIKRYAEHHEDLEKLKEFIKANKPELYHDIFKDETKNGYAGYIENGVKQDEFYKYLKNTLSKITGSDYFLDQIEREDFLRKQRTFDNGSIPHQIHLQEMHAILRRQGDYYPFLKENQDRIEKILTFRIPYYVGPLARKNSRFAWAEYHSDEAVTPWNFDQVIDKESSAQAFIEHMTNNDLYLPNEKVLPKHSPLYEKYTVYNELTKIKYVTEIGEAKFFDANLKQEIFDGLFKHERKVTKKKLRTFLDKNFDEFRIVDIQGLDKETETFNASYATYQDLLKVIKDKVFMDNPENAEILENIVLTLTLFEDREMIKQRLAKYADVFDKKVIDQLARRHYTGWGRLSAKLLNGIRDKQSCKTIMDYLIDDAQSNRNLMQLITDDNLTFKDDIVKAQYVDNSDDLHQVVQSLAGSPAIKKGILQSLKIVDELVKVMGKEPEQIVVEMARENQTTAKGRRNSQQRYKRLKEAIKSLDRDLNHKILKEHPTDNQALQNNRLFLYYLQNGRDMYTGESLDINRLSDYDIDHVIPQAFIKDNSIDNRVLTSSKANRGKSDDVPSEDVVNRMRPFWNKLLSSGLISQRKYNNLTKKELTLDDKAGFIKRQLVETRQITKHVARMLDERFNKEFDDNNKRIRRVKIVTLKSNLVSSFRKEFELYKVREINDYHHAHDAYLNAVVVKALLVKYPKLEPEFVYGEYPKYNSYRERKTATQKMFFYSNIMNMFKSKVKLADDQIVERPMIEVNDETGEIAWDKTKHITTVKKVLSYPQVNIVKKVEEQTIGQNGGLFDDNPKSPLEVIPSKLVPLKKALNPEKYGGYQKPTTAYPILLIVDTKQLIPISVMDKKRFEQNPVKFLKDKGYQQIEKNNFVKLPKYTLVDIGNGIKRLWASSKEVHKGNQLVVSKKSQDLLYHAHHLDNDYSNEYVKNHYQQFDILFNEITSFSKKCKLGKEHIQKIEEAYSKERDFASIEELADGFIKLLGFTQLGATSPFSFLGIKLNQKQYTGKKDYLLPCMEATLIHQSITGLYETRIDLSKLGGD

SEQ ID NO: 515 - protein, 1355 aa, Streptococcus mutans NMT4863; identical to SEQ ID NO: 514

SEQ ID NO: 516 - protein, 1345 aa, Streptococcus mutans
MKKPYSIGLDIGTNSVGWAVVTDDYKVPAKKMKVLGNTDKSHIKKNLLGALLFDSGNTAADRRLKRTARRRYTRRRNRILYLQEIFAEEMSKVDDSFFHRLEDSFLVTEDKRGERHPIFGNLEEEVKYHENFPTIYHLRQYLADNPEKVDLRLVYLALAHIIKFRGHFLIEGKFDTRNNDVQRLFQEFLAVYDNTFENSSLQEQNVQVEEILTDKISKSAKKDRVLKLFPNEKSNGRFAEFLKLIVGNQADFKKHFELEEKAPLQFSKDTYEEELEVLLAQIGDNYAELFLSAKKLYDSILLSGILTVTDVSTKAPLSASMIQRYNEHQMDLAQLKQFIRQKLSDKYNEVFSDVSKDGYAGYIDGKTNQEAFYKYLKGLLNKIEGSGYFLDKIEREDFLRKQRTFDNGSIPHQIHLQEMRAIIRRQAEFYPFLADNQDRIEKILTFRIPYYVGPLARGKSDFAWLSRKSADKITPWNFDEIVDKESSAEAFINRMTNYDLYLPNQKVLPKHSLLYEKFTVYNELTKVKYKTEQGKTAFFDANMKQEIFDGVFKVYRKVTKDKLMDFLEKEFDEFRIVDLTGLDKENKAFNASYGTYHDLRKILDKDFLDNSKNEKILEDIVLTLTLFEDREMIRKRLENYSDLLTKEQVKKLERRHYTGWGRLSAELIHGIRNKESRKTILDYLIDDGNSNRNFMQLINDDALSFKEEIAKAQVIGETDNLNQVVSDIAGSPAIKKGILQSLKIVDELVKIMGHQPENIVVEMARENQFTNQGRRNSQQRLKGLTDSIKEFGSQILKEHPVKHSQLQNDRLFLYYLQNGRDMYTGEELDIDYLSQYDIDHIIPQAFIKDNSIDNRVLTSSKENRGKSDDVPSKNVVRKMKSYWSKLLSAKLITQRKFDNLTKAERGGLTDDDKAGFIKRQLVETRQITKHVARILDERFHTETDENNKKIRQVKIVTLKSNLVSNFRKEFELYKVREINDYHHAHDAYLNAVIGKALLGVYPQLEPEFVYGDYPHFHGHKENKATAKKFFYSNIMNFFKKDDVRTDKNGEIIWKKDEHISNIKKVLSYPQVNIVKKVEEQTGGFSKESILPKGNSDKLIPRKTKKFYWDTKKYGGFDSPIVAYSILVIADIEKGKSKKLKTVKALVGVTIMEKMTFERDPVAFLERKGYRNVQEENIIKLPKYSLFKLENGRKRLLASARELQKGNEIVLPNHLGTLLYHAKNIHKVDEPKHLDYVDKHKDEFKELLDVVSNFSKKYTLAEGNLEKIKELYAQNNGEDLKELASSFINLLTFTAIGAPATFKFFDKNIDRKRYTSTTEILNATLIHQSITGLYETRIDLSKLGGD

SEQ ID NO: 517 - protein, 1345 aa, Streptococcus mutans NV1996; identical to SEQ ID NO: 463

SEQ ID NO: 518 - protein, 1345 aa, Streptococcus mutans NVAB
MKKPYSIGLDIGTNSVGWAVVTDDYKVPAKKMKVLGNTDKSHIKKNLLGALLFDSGNTAADRRLKRTARRRYTRRRNRILYLQEIFAEEMSKVDDSFFHRLEDSFLVTEDKRGERHPIFGNLEEEVKYHENFPTIYHLRQYLADNPEKVDLRLVYLALAHIIKFRGHFLIEGKFDTRNNDVQRLFQEFLAVYDNTFENSSLQEQNVQVEEILTDKISKSAKKDRVLKLFPNEKSNGRFAEFLKLIVGNQADFKKHFELEEKAPLQFSKDTYEEELEVLLAQIGDNYAELFLSAKKLYDSILLSGILTVTDVSTKAPLSASMIQRYNEHQMDLAQLKQFIRQKLSDKYNEVFSDVSKDGYAGYIDGKTNQEAFYKYLKGLLNKIEGSGYFLDKIEREDFLRKQRTFDNGSIPHQIHLQEMRAIIRRQAEFYPFLADNQDRIEKILTFRIPYYVGPLARGKSDFAWLSRKSADKITPWNFDEIVDKESSAEAFINRMTNYDLYLPNQKVLPKHSLLYEKFTVYNELTKVKYKTEQGKTAFFDANMKQEIFDGVFKVYRKVTKDKLMDFLEKEFDEFRIVDLTGLDKENKVFNASYGTYHDLCKILDKDFLDNSKNEKILEDIVLTLTLFEDREMIRKRLENYSDLLTKEQVKKLERRHYTGWGRLSAELIHGIRNKESRKTILDYLIDDGNSNRNFMQLINDDALSFKEEIAKAQVIGETDNLNQVVSDIAGSPAIKKGILQSLKIVDELVKIMGHQPENIVVEMARENQFTKQGRRNSQQRLKGLTDSIKEFGSQILKEHPVENSQLQNDRLFLYYLQNGRDMYTGEELDIDYLSQYDIDHIIPQAFIKDNSIDNRVLTSSKENRGKSDDVPSKDVVRKMKSYWSKLLSAKLITQRKFDNLTKAERGGLTDDDKAGFIKRQLVETRQITKHVARILDERFYTETDENNKKIRQVKIVTLKSNLVSNFRKEFELYKVREINDYHHAHDAYLNAVIGKALLGVYPQLEPEFVYGDYPHFHGHKENKATAKKFFYSNIMNFFKKDDVRTDKNGEIIWKKDEHISNIKKVLSYPQVNIVKKVEEQTGGFSKESILPKGNSDKLIPRKTKKFYWDTKKYGGFDSPIVAYSILVIADIEKGKSKKLKTVKALVGVTIMEKMTFERDPVAFLERKGYRNVQEENIIKLPKYSLFKLENGRKRLLASARELQKGNEIVLPNHLGTLLYHAKNIHKVDEPKHLDYVDKHKDEFKELLDVVSNFSKKYTLAEGNLEKIKELYAQNNGEDLKELASSFINLLTFTAIGAPATFKFFDKNIDRKRYTSTTEILNATLIHQSITGLYETRIDLSKLGGD

SEQ ID NO: 519 - protein, 1345 aa, Streptococcus mutans NVAB; identical to SEQ ID NO: 518

SEQ ID NO: 520 - protein, 1345 aa, Streptococcus mutans R221
MKKPYSIGLDIGTNSVGWAVVTDDYKVPAKKMKVLGNTDKSHIKKNLLGALLFDSGNTAEDRRLKRTARRRYTRRRNRILYLQEIFSEEMGKVDDSFFHRLEDSFLVTEDKRGERHPIFGNLEEEVKYHENFPTIYHLRQYLADNPEKTDLRLVYLALAHIIKFRGHFLIEGKFDTRNNDVQRLFQEFLAVYDNTFENSSLQEQNVQVEEILTDKISKSAKKDRVLKLFPNEKSNGRFAEFLKLIVGNQADFKKHFELEEKAPLQFSKDIYEEELEVLLAQIGDNYAELFLSAKKLYDSILLSGILTVTDVSTKAPLSASMIQRYNEHQMDLAQLKQFIRQKLSDKYNEVFSDVSKDGYAGYIDGKTNQEAFYKYLKGLLNKIEGSGYFLDKIEREDFLRKQRTFDNGSIPHQIHLQEMRAIIRRQAEFYPFLADNQDRIEKILTFRIPYYVGPLARGKSDFAWLSRKSADKITPWNFDEIVDKESSVEAFINRMTNYDLYLPNQKVLPKHSLLYEKFTVYNELTKVKYKTEQGKTAFFDANMKQEIFDGVFKVYRKVTKDKLMDFLEKEFDEFRIVDLTGLDKENKAFNASYGTYHDLRKILDKDFLDNSKNEKILEDIVLTLTLFEDREMIRKRLKNYSDLLTKEQLKKLERRHYTGWGRLSAELIHGIRNKESRKTILDYLIDDGNSNRNFMQLINDDALSFKEEIAKAQVIGETDNLNQVVSDIAGSPAIKKGILQSLKIVDELVKIMGHQPENIVVEMARENQFTNQGRRNSQQRLKGLTDSIKEFGSQILKEHPVENSQLQNDRLFLYYLQNGRDMYTGEELDIDYLSQYDIDHIIPQAFIKDNSIDNRVLTSSKENRGKSDDVPSKDVVRKMKSYWSKLLSAKLITQRKFDNLTKAERGGLTDDDKAGFIKRQLVETRQITKHVARILDERFNTETDENNKKIRQVKIVTLKSNLVSNFRKEFELYKVREINDYHHAHDAYLNAVIGKALLGVYPQLEPEFVYGDYPHFHGHKENKATAKKFFYSNIMNFFKKDDVRTDKNGEIIWKKDEHISNIKKVLSYPQVNIVKKVEEQTGGFSKESILPKGNSDKLIPRKTKKFYWDTKKYGGFDSPIVAYSILVIADIEKGKSKKLKTVKALVGVTIMEKMTFERDPVAFLERKGYRNVQEENIIKLPKYSLFKLENGRKRLLASARELQKGNEIVLPNHLGTLLYHAKNIHKVDEPKHLDYVDKHKDEFKELLDVVSNFSKKYTLAEGNLEKIKELYAQNNGEDLKELASSFINLLTFTAIGAPATFKFFDKNIDRKRYTSTTEILNATLIHQSITGLYETRIDLNKLGGD

SEQ ID NO: 521 - protein, 1345 aa, Streptococcus mutans R221; identical to SEQ ID NO: 520

SEQ ID NO: 522 - protein, 1345 aa, Streptococcus mutans S1B
MKKPYSIGLDIGTNSVGWAVVTDDYKVPAKKMKVLGNTDKSHIKKNLLGALLFDSGNTAEDRRLKRTARRRYTRRRNRILYLQEIFSEEMGKVDDSFFHRLDESFLTDDDKNFDSYPIFGNKAEEDAYHQKFPTIYHLRKHLADSTEKADLRLVYLALAHMIKFRGHFLIEGELNAENTDVQKLFADFVGVYDRTFDDSHLSEITVDASSILTEKISKSRRLEKLINNYPKEKKNTLFRNLVALSLGLQPNFKTNFKLSEDAKLQFSKDTYEEDLEELLGKIGDDYADLFTLAKNLYDAILLSGILTADDSSTKAPLSASMIKRYAEHHEDLEKLKEFIKANKPELYHDIFKDETKNGYAGYIENGVKQDEFYKYLKNTLSKIAGSDYFLDKIEREDFLRKQRTFDNGSIPHQIHLQEMHAILRRQGDYYPFLKENQDRIEKILTFRIPYYVGPLARGKSDFAWLSRKSADKITPWNFDEIVDKESSVEAFINRMTNYDLYLPNQKVLPKHSLLYEKFTVYNELTKVKYKTEQGKTAFFDANMKQEIFDGVFKVYRKVTKDKLMDFLEKEFDEFRIVDLTGLDKENKAFNASYGTYHDLRKILDKDFLDNSKNEKILEDIVLTLTLFEDREMIRKRLKNYSDLLTKEQLKKLERRHYTGWGRLSAELIHGIRNKESRKTILDYLIDDGNSNRNFMQLINDDALSFKEEIAKAQVIGETDNLNQVVSDIAGSPAIKKGILQSLKIVDELVKIMGHQPENIVVEMARENQFTNQGRRNSQQRLKGLTDSIKEFGSQILKEHPVENSQLQNDRLFLYYLQNGRDMYTGEELDIDYLSQYDIDHIIPQAFIKDNSIDNRVLTSSKENRGKSDDVPSKDVVRKMKSYWSKLLSAKLITQRKFDNLTKGERGGLTDDDKAGFIKRQLVETRQITKHVARILDERFNTETDENNKKIRQVKIVTLKSNLVSNFRKEFELYKVREINDYHHAHDAYLNAVIGKALLGVYPQLEPEFVYGDYPHFHGHKENKATAKKFFYSNIMNFFKKDDVRTDKNGEIIWKKDEYISNIKKVLSYPQVNIVKKVEEQTGGFSKESILPKGDSDKLIPRKTKKFYWDTKKYGGFDSPIVAYSILVIADIEKGKSKKLKTVKALVGVTIMEKMTFERDPVAFLERKGYRNVQEENIIKLPKYSLFKLENGRKRLLASARELQKGNEIVLPNHLGTLLYHAKNIHKVDEPKHLDYVDKHKDEFKELLDVVSNFSKKYTLAEGNLEKIKELYAQNNGEDLKELASSFINLLTFTAIGAPATFKFFDKNIDRKRYTSTTEILNATLIHQSITGLYETRIDLSKLGGD

SEQ ID NO: 523 - protein, 1345 aa, Streptococcus mutans S1B; identical to SEQ ID NO: 522

SEQ ID NO: 524 - protein, 1345 aa, Streptococcus mutans SF1; identical to SEQ ID NO: 463

SEQ ID NO: 525 - protein, 1345 aa, Streptococcus mutans SF14
MKKPYSIGLDIGTNSVGWAVVTDDYKVPAKKMKVLGNTDKSHIKKNLLGALLFDSGNTAEDRRLKRTARRRYTRRRNRILYLQEIFSEEMGKVNDSFFHRLEDSFLVTEDKRGERHPIFGNLEEEVKYHENFPTIYHLRQYLADNPEKVDLRLVYLALAHIIKFRGHFLIEGKFDTRNNDVQRLFQEFLAVYDNTFENSSLQEQNVQVEEILTDKISKSAKKDRVLKLFPNEKSNGRFAEFLKLIVGNQADFKKHFELEEKAPLQFSKDTYEEELEVLLAQIGDNYAELFLSAKKLYDSILLSGILTVTDVSTKAPLSASMIQRYNEHQMDLAQLKQFIRQKLSDKYNEVFSDVSKDGYAGYIDGKTNQEAFYKYLKGLLNKIEGSGYFLDKIEREDFLRKQRTFDNGSIPHQIHLQEMRAIIRRQAEFYPFLADNQDRIEKILTFRIPYYVGPLARGKSDFAWLSRKSADKITPWNFDEIVDKESSAEAFINRMTNYDLYLPNQKVLPKHSLLYEKFTVYNELTKVKYKTEQGKTAFFDANMKQEIFDGVFKVYRKVTKDKLMDFLEKEFDEFRIVDLTGLDKENKVFNASYGTYHDLCKILDKDFLDNSKNEKILEDIVLTLTLFEDREMIRKRLENYSDLLTKEQVKKLERRHYTGWGRLSAELIHGIRNKESRKTILDYLIDDGNSNRNFMQLINDDALSFKEEIAKAQVIGETDNLNQVVSDIAGSPAIKKGILQSLKIVDELVKIMGHQPENIVVEMARENQFTKQGRRNSQQRLKGLTDSIKEFGSQILKEHPVENSQLQNDRLFLYYLQNGRDMYTGEELDIDYLSQYDIDHIIPQAFIKDNSIDNRVLTSSKENRGKSDDVPSKDVVRKMKSYWSKLLSAKLITQRKFDNLTKAERGGLTDDDKAGFIKRQLVETRQITKHVARILDERFYTETDENNKKIRQVKIVTLKSNLVSNFRKEFELYKVREINDYHHAHDAYLNAVIGKALLGVYPQLEPEFVYGDYPHFHGHKENKATAKKFFYSNIMNFFKKDDVRTDKNGEIIWKKDEYISNIKKVLSYPQVNIVKKVEEQTGGFSKESILPKGNSDKLIPRKTKKFYWDTKKYGGFDSPIVAYSILVIADIEKGKSKKLKTVKALVGVTIMEKMTFERDPIAFLERKGYRNVQEENIIKLPKYSLFKLENGRKRLLASARELQKGNEIVLPNHLGTLLYHAKNIHKVDEPKHLDYVDKHKDEFKELLDVVSNFSKKYTLAEGNLEKIKELYAQNNGEDLKELASSFINLLTFTAIGAPAAFKFFDKNIDRKRYTSTTEILNATLIHQSITGLYETRIDLSKLGGD

SEQ ID NO: 526 - protein, 1345 aa, Streptococcus mutans SF14; identical to SEQ ID NO: 525

SEQ ID NO: 527 - protein, 1345 aa, Streptococcus mutans SM1
MKKPYSIGLDIGTNSVGWAVVTDDYKVPAKKMKVLGNTDKSHIKKNLLGALLFDSGNTAEDRRLKRTARRRYTRRRNRILYLQEIFSEEMGKVDDSFFHRLEDSFLVTEDKRGERHPIFGNLEEEVKYHENFPTIYHLRQYLADNPEKVDLRLVYLALAHIIKFRGHFLIEGKFDTRNNDVQKLFQEFLAVYDNTFENSSLQEQNVQVEEILTDKISKSAKKDRVLKLFPNEKSNGRFAEFLKLIVGNQADFKKHFELEEKAPLQLSKDTYEEELEVLLAQIGDNYAELFLSAKKLYDSILLSGILTVTDVSTKAPLSASMIQRYNEHQMDLAQLKQFIRQKLSDKYNEVFSDVSKDGYAGYIDGKTNQEAFYKYLKGLLNKIEGSGYFLDKIEREDFLRKQRTFDNGSIPHQIHLQEMRAIIRRQAEFYPFLADNQDRIEKILTFRIPYYVGPLARGKSDFAWLSRKSADKITPWNFDEIVDKESSVEAFINRMTNYDLYLPNQKVLPKHSLLYEKFTVYNELTKVKYKTEQGKTAFFDANMKQEIFDGVFKVYRKVTKDKLMDFLEKEFDEFRIVDLTGLDKENKAFNASYGTYHDLRKILDKDFLDNSKNEKILEDIVLTLTLFEDREMIRKRLENYSDLLTKEQVKKLERRHYTGWGRLSAELIHGIRNKESRKTLLDYLIDDGNSNRNFMQLINDDALSFKEEIAKAQVIGETDNLNQVVSDIAGSPAIKKGILQSLKIVDELVKIMGHQPENIVVEMARENQFTNQGRRNSQQRLKGLTDSIKEFGSQILKEHPVENSQLQNDRLFLYYLQNGRDMYTGEELDIDYLSQYDIDHIIPQAFIKDNSIDNRVLTSSKENRGKSDDVPSKDVVRKMKSYWSKLLSAKLITQRKFDNLTKAERGGLTDDDKAGFIKRQLVETRQITKHVARILDERFNTETDENNKKIRQVKIVTLKSNLVSNFRKEFELYKVREINDYHHAHDAYLNAVIGKALLGVYPQLEPEFVYGDYPHFHGHKENKATAKKFFYSNIMNFFKKDDVRTDKNGEIIWKKDEYISNIKKVLSYPQVNIVKKVEEQTGGFSKESILPKGNSDKLIPRKTKKFYWDTKKYGGFDSPIVAYSILVIADIEKGKSKKLKTVKALVGVTIMEKMTFERDPIAFLERKGYRNVQEENIIKLPKYSLFKLENGRKRLLASARELQKGNEIVLPNHLGTLLYHAKNIHKVDEPKHLDYVDKHKDEFKELLDVVSNFSKKYTLAEGNLEKIKELYAQNNGEDLKELASSFINLLTFTAIGAPATFKFFDKNIDRKRYTSTTEILNATLIHQSITGLYETRIDLSKLGGD

SEQ ID NO: 528 - protein, 1345 aa, Streptococcus mutans SM1; identical to SEQ ID NO: 527

SEQ ID NO: 529 - protein, 1345 aa, Streptococcus mutans SM4
MKKPYSIGLDIGTNSVGWAVVTDDYKVPAKKMKVLGNTDKSHIKKNLLGALLFDSGNTAEDRRLKRTARRRYTRRRNRILYLQEIFSEEMDKVDDSFFHRLEDSFLVTEDKRGERHPIFGNLEEEVKYHENFPTIYHLRQYLADNPEKVDLRLVYLALAHIIKFRGHFLIEGKFDTRNNDVQRLFQEFLAVYDNTFENSSLQEQNVQVEEILTDKISKSAKKDRVLKLFPNEKSNGRFAEFLKLIVGNQADFKKHFELEEKAPLQFSKDTYEEELEVLLAQIGDNYAELFLSAKKLYDSILLSGILTVTDVSTKAPLSASMIQRYNEHQMDLAQLKQFIRQKLSDKYNEVFSDVSKDGYAGYIDGKTNQEAFYKYLKGLLNKIEGSGYFLDKIEREDFLRKQRTFDNGSIPHQIHLQEMRAIIRRQAEFYPFLADNQDRIEKILTFRIPYYVGPLARGKSDFAWLSRKSADKITPWNFDEIVDKESSAEAFINRMTNYDLYLPNQKVLPKHSLLYEKFTVYNELTKVKYKTEQGKTAFFDANMKQEIFDGVFKVYRKVTKDKLMDFLEKEFDEFRIVDLTGLDKENKVFNASYGTYHDLCKILDKDFLDNSKNEKILEDIVLTLTLFEDREMIRKRLENYSDLLTKEQVKKLERRHYTGWGRLSAELIHGIRNKESRKTILDYLIDDGNSNRNFMQLINDDALSFKEEIAKAQVIGETDNLNQVVSDIAGSPAIKKGILQSLKIVDELVKIMGHQPENIVVEMARENQFTKQGRRNSQQRLKGLTDSIKEFGSQILKEHPVENSQLQNDRLFLYYLQNGRDMYTGEELDIDYLSQYDIDHIIPQAFIKDNSIDNRVLTSSKENRGKSDDVPSKDVVRKMKSYWSKLLSAKLITQRKFDNLTKAERGGLTDDDKAGFIKRQLVETRQITKHVARILDERFYTETDENNKKIRQVKIVTLKSNLVSNFRKEFELYKVREINDYHHAHDAYLNAVIGKALLGVYPQLEPEFVYGDYPHFHGHKENKATAKKFFYSNIMNFFKKDDVRTDKNGEIIWKKDEHISNIKKVLSYPQVNIVKKVEEQTGGFSKESILPKGNSDKLIPRKTKKFYWDTKKYGGFDSPIVAYSILVIADIEKGKSKKLKTVKALVGVTIMEKMTFERDPVAFLERKGYRNVQEENIIKLPKYSLFKLENGRKRLLASARELQKGNEIVLPNHLGTLLYHAKNIHKVDEPKHLDYVDKHKDEFKELLDVVSNFSKKYTLAEGNLEKIKELYAQNNGEDLKELASSFINLLTFTAIGAPATFKFFDKNIDRKRYTSTTEILNATLIHQSITGLYETRIDLSKLGGD

SEQ ID NO: 530 - protein, 1345 aa, Streptococcus mutans SM4; identical to SEQ ID NO: 529

SEQ ID NO: 531 - protein, 1345 aa, Streptococcus mutans SM6
MKKPYSIGLDIGTNSVGWAVVTDDYKVPAKKMKVLGNTDKSHIKKNLLGALLFDSGNTAEDRRLKRTARRRYTRRRNRILYLQEIFSEEMGKVDDSFFHRLEDSFLVTEDKRGERHPIFGNLEEEVKYHENFPTIYHLRQYLADNPEKTDLRLVYLALAHIIKFGGHFLIEGKFDTRNNDVQRLFQEFLAVYDNTFENSSLQEQNVQVEEILTDKISKSAKKDRVLKLFPNEKSNGRFAEFLKLIVGNQADFKKHFELEEKAPLQFSKDIYEEELEVLLAQIGDNYAELFLSAKKLYDSILLSGILTVTDVSTKAPLSASMIQRYNEHQMDLAQLKQFIRQKLSDKYNEVFSDVSKDGYAGYIDGKTNQEAFYKYLKGLLNKIEGSGYFLDKIEREDFLRKQRTFDNGSIPHQIHLQEMRAIIRRQAEFYPFLADNQDRIEKILTFRIPYYVGPLARGKSDFAWLSRKSADKITPWNFDEIVDKESSVEAFINRMTNYDLYLPNQKVLPKHSLLYEKFTVYNELTKVKYKTEQGKTAFFDANMKQEIFDGVFKVYRKVTKDKLMDFLEKEFDEFRIVDLTGLDKENKAFNASYGTYHDLRKILDKDFLDNSKNEKILEDIVLTLTLFEDREMIRKRLKNYSDLLTKEQLKKLERRHYTGWGRLSAELIHGIRNKESRKTILDYLIDDGNSNRNFMQLINDDALSFKEEIAKAQVIGETDNLNQVVSDIAGSPAIKKGILQSLKIVDELVKIMGHQPENIVVEMARENQFTNQGRRNSQQRLKGLTDSIKEFGSQILKEHPVENSQLQNDRLFLYYLQNGRDMYTGEELDIDYLSQYDIDHIIPQAFIKDNSIDNRVLTSSKENRGKSDDVPSKNVVRKMKSYWSKLLSAKLITQRKFDNLTKAERGGLTDDDKAGFIKRQLVETRQITKHVARILDERFHTETDENNKKIRQVKIVTLKSNLVSNFRKEFELYKVREINDYHHAHDAYLNAVIGKALLGVYPQLEPEFVYGDYPHFHGHKENKATAKKFFYSNIMNFFKKDDVRTDKNGEIIWKKDEHISNIKKVLSYPQVNIVKKVEEQTGGFSKESILPKGNSDKLIPRKTKKFYWDTKKYGGFDSPIVAYSILVIADIEKGKSKKLKTVKALVGVTIMEKMTFERDPVAFLERKGYRNVQEENIIKLPKYSLFKLENGRKRLLASARELQKGNEIVLPNHLGTLLYHAKNIHKVDEPKHLDYVDKHKDEFKELLDVVSNFSKKYTLAEGNLEKIKELYAQNNGEDLKELASSFINLLTFTAIGAPATFKFFDKNIDRKRYTSTTEILNATLIHQSITGLYETRIDLSKLGGD

SEQ ID NO: 532 - protein, 1345 aa, Streptococcus mutans SM6; identical to SEQ ID NO: 531

SEQ ID NO: 533 - protein, 1134 aa, Streptococcus mutans ST1
MANGKILGLDIGIASVGVGIIDKETGKIIHVNSRIFPAATADSNVERRGFRQGRRLVRRKKHRKVRLADLFLDSNLLTDFSKVSLNLNPYQLRVKGLNEELSNEELFIALKSIVSRRGISYLDDASEDSGANSSEYGKAVEENRKLLEDRTPGQIQLERFEKYGKVRGDFTVVENGENHRLINVFSTSAYKKEAERILRRQQEFNMRIADEFIEAYLTILTGKRKYYHGPGNEKSRTDYGRFRTDGTTLDNIFGILIGKCTFYPDEYRAAKASYTAQEFNLLNDLNNLTVPTETKKLSEEQKRQIIEHAKTVKTLGAPTLLKYIVKLVGCSADDIKGYRIDKSDKPEIHTFEAYRKMRTMELIKVDDLSRESLDALAHILTLNTEREGIEEAIRDRFTNKEFNQEQINELVLFRKNNSSLFGKGWHNFSLKLMKELIPELYETSEEQMTILTRLGKQRVKKSSNRTNYIDEKELTEEIYNPVVAKSVRQAIKIINLATKKYGVFDNIVIEMARESNEDDEKKAIQNAQKANEDEKKAALLKAAHQFNGKEELPDSIFHGHKELLTKIRLWHQQGEKCLYTGKTIFINDLIHNPYKYEIDHILPLSLSFDDSLANKVLVLSTANQEKGQRTPFQSLDSMDGAWTYREFKSYVKGLKTLSNKKKDYLLTEENIDKIEVKQKFIERNLVDTRYSSRVVLNALQDFYKERKFDTKISVVRGQFTSQLRRKWRIEKTRETYHHHAVDALIIAASSQLNLWKKQNNPLISYKEDQFVDPETGEILSLSDDEYKKLVFKAPYEHFVDTLKSKKFEDSILFSYQVDSKYNRKISGATICGTRKAQLGKDTQEETYVLGKIKDIYSQKGYEDFIKKYKKDKTQFLMYHKDPQTFEKVIEEILKTYPDKELNEKGKEVSCNPFEKYRQENGPVRKYSKKGNGPEIKSLKYYDEVLGKNIDITPKNSLNKVVLRSLNPWRTDVYFNHETRKYEFLGLKYSDLRYLKGEHRYGILIGDYKKIKDKEGIEKESEFKFTLYKNDLILIKDTAKGKEELFRFWSRTGKDNAKTFEKNKIELKPYSKSQFEKGEDTNVLGKLYASSNQLQKSFGTLENLSIYKVRTDVLGNKYFIKKEGDKPQLNFKKKL

SEQ ID NO: 534 - protein, 1134 aa, Streptococcus mutans ST1; identical to SEQ ID NO: 533

SEQ ID NO: 535 - protein, 1350 aa, Streptococcus mutans ST6
MKKPYSIGLDIGTNSVGWAVVTDDYKVPAKKMKVLGNTDKSHIEKNLLGALLFDSGNTAEDRRLKRTARRRYTRRRNRILYLQEIFSEEMGKVDDSFFHRLEDSFLVTEDKRGERHPIFGNLEEEVKYHENFPTIYHLRQYLADNPEKVDLRLVYLALAHIIKFRGHFLIEGKFDTRNNDVQRLFQEFLAVYDNTFENSSLQEQNVQVEEILTDKISKSAKKDRVLKLFPNEKSNGRFAEFLKLIVGNQADFKKHFELEEKAPLQFSKDTYEEELEVLLAQIGDNYAELFLSAKKLYDSILLSGILTVTDVSTKAPLSASMIQRYNEHQMDLTQLKQFIRQKLSDKYNEVFSDVSKDGYAGYIDGKTNQEAFYKYLKGLLNKIEGSGYFLDKIEREDFLRKQRTFDNGSIPHQIHLQEMRAIIRRQAEFYSFLADNQDRIEKILTFRIPYYVGPLARGKSDFAWLSRKSADKITPWNFDEIVDKESSAEAFINRMTNYDLYLPNQKVLPKHSLLYEKFTVYNELTKVKYKTEQGKTAFFDANMKQEIFDGVFKVYRKVTKDKLMDFLEKEFDEFRIVDLTGLDKENKAFNASYGTYHDLRKILDKDFLDNSKNEKILEDIVLTLTLFEDREMIRKRLENYSDLLTKEQVKKLERRHYTGWGRLSAELIHGIRNKESRKTILDYLIDDGNSNRNFMQLINDDALSFKEEIAKAQVIGETDNLNQVVSDIAGSPAIKKGILQSLKIVDELVKIMGHQPENIVVEMARENQFTNQGRRNSQQRLKGLTDSIKEFGSQILKEHPVENSQLQNDRLFLYYLQNGRDMYTGEELDIDYLSQYDIDHIIPQAFIKDNSIDNRVLTSSKENRGKSDDVPSEDVVNRMRPFWNKLLSSGLISQRKYNNLTKKELTLDDKAGFIKRQLVETRQITKHVARMLDERFNKEFDDNNKRIRKVKIVTLKSNLVSSFRKEFELYKVREINDYHHAHDAYLNAVVVKALLVKYSKLEPEFVYGEYPKYNSYRERKTATQKMFFYSNIMNMFKSKVKLADDQIVERPMIEVNDETGEIAWDKTKHITTVKKVLSYPQVNIVKKVEEQTIGQNGGLFDDNPKSPLEVIPSKLVPLKKALNPEKYGGYQKPTTAYPILLIVDTKQLIPISVMDKKRFEQNPVKFLKDKGYQQIEKNNFVKLPKYTLVDIGNGIKRLWASSKEVHKGNQLVVSKKSQDLLYHAHHLDNDYSNEYVKNHYQQFDILFNEITSFSKKCKLGKEHIQKIEEAYSKERDSASIEELADGFIKLLGFTQLGATSPFSFLGIKLNQKQYTGKKDYLLPCMEATLIHQSITGLYETRIDLSKLGGD

SEQ ID NO: 536 - protein, 1350 aa, Streptococcus mutans ST6; identical to SEQ ID NO: 535

SEQ ID NO: 537 - protein, 1125 aa, Streptococcus mutans U2A
MTNGKILGLDIGIASVGVGIINAKTGNVEHASSRIFPAANADNNVERRSARGGRRLIRRKKHRLKRVEDLFEKYNIDTDFSNLNLNPYQLRVKGLNEQLSNEELFAILKNIAKRRGISYLDDAEDDSVGSSDYAKAIDENRKLLKKQTPGEIQLKRLEKYGQLRGNFTIQDENGEYHRLINVFSTSDYVKEARRILETQSYYNKFITESFVEDYIKILQGKRKYYVGPGNEKSRTDYGIYRTDGETLDNLFGILIGKCGFYPEEYRAAKASYTAQEYNFLNDLNNLTVPTETKKLSTEQKYQLVDFAKTASTLGAAKLLKEIAKLVGCQVEEIKGYRLDNKDKPDLHTFEPFRKLKSNLTTIAVENLSITTLDTLAHILTLNTEREGIEEAIQKELPNIFSDEQITEIIAVRKKNSQIFGKGWHSFSIKLMKELIPELYETSEEQMTILTRLKKVKTNSKITNRTKYINEEEITDEIYNPVVSKSIRQTVKIINATIKKYGAFDQIIIEMPRESNEEDERKFIADLQKSNAKEKDDAMKQAALLYNGKDELPHDVFHGHKELATKIRLWYQQGERCLYSGKHIDIHDLIHNQHMFEIDHVLPLSLSFDDSLANKVLVYSWANQEKGQRTPFQALPQMASAWSFRELRDYISKQKGISKKKRDYLLTEQDINKVEVKQKFIERNLVDTRYVSRVVLNTLQDALKVMNKETKISVIRGQFTSQLRRQWRIDKSRETYHHHAVDALIIAASSQLRLWKKQNNPMFAEDKHGQKINLDTGEVLSDDAYKELVYQAPYQGFVNTISSKSFEDEILFSYQVDSKVNRKISDATIYATRQAQLGKDKKEETYVLGKIKDIYSQAGYDAFRKKYDKDKAVFLMYQKDPETWEKVIEVILRDYKELDDKGKEIGNPFERYKVKHGFVRKYSRKNKGTEIKSLKYYDNKLGNHIDITPNNSKHSVVLQSINPWRADLYFNPETTKYELMGLKYADLSFEKGTGKYSISREKYDEIKEREGISSKSEFKFTLYKNDLILVKDIGNHKELIARFNSKNDTSKHYVELKPWNKAKFDSEEELIPAFGKVAKSGQFIKGLNKPDLSIYKVKTDILGHKYYIKKEGDKPKLNFENKIKNK

SEQ ID NO: 538 - protein, 1125 aa, Streptococcus mutans U2A; identical to SEQ ID NO: 537

SEQ ID NO: 539 - protein, 1345 aa, Streptococcus mutans UA159
MKKPYSIGLDIGTNSVGWAVVTDDYKVPAKKMKVLGNTDKSHIEKNLLGALLFDSGNTAEDRRLKRTARRRYTRRRNRILYLQEIFSEEMGKVDDSFFHRLEDSFLVTEDKRGERHPIFGNLEEEVKYHENFPTIYHLRQYLADNPEKVDLRLVYLALAHIIKFRGHFLIEGKFDTRNNDVQRLFQEFLAVYDNTFENSSLQEQNVQVEEILTDKISKSAKKDRVLKLFPNEKSNGRFAEFLKLIVGNQADFKKHFELEEKAPLQFSKDTYEEELEVLLAQIGDNYAELFLSAKKLYDSILLSGILTVTDVGTKAPLSASMIQRYNEHQMDLAQLKQFIRQKLSDKYNEVFSDVSKDGYAGYIDGKTNQEAFYKYLKGLLNKIEGSGYFLDKIEREDFLRKQRTFDNGSIPHQIHLQEMRAIIRRQAEFYPFLADNQDRIEKLLTFRIPYYVGPLARGKSDFAWLSRKSADKITPWNFDEIVDKESSAEAFINRMTNYDLYLPNQKVLPKHSLLYEKFTVYNELTKVKYKTEQGKTAFFDANMKQEIFDGVFKVYRKVTKDKLMDFLEKEFDEFRIVDLTGLDKENKVFNASYGTYHDLCKILDKDFLDNSKNEKILEDIVLTLTLFEDREMIRKRLENYSDLLTKEQVKKLERRHYTGWGRLSAELIHGIRNKESRKTILDYLIDDGNSNRNFMQLINDDALSFKEEIAKAQVIGETDNLNQVVSDIAGSPAIKKGILQSLKIVDELVKIMGHQPENIVVEMARENQFTNQGRRNSQQRLKGLTDSIKEFGSQILKEHPVENSQLQNDRLFLYYLQNGRDMYTGEELDIDYLSQYDIDHIIPQAFIKDNSIDNRVLTSSKENRGKSDDVPSKDVVRKMKSYWSKLLSAKLITQRKFDNLTKAERGGLTDDDKAGFIKRQLVETRQITKHVARILDERFNTETDENNKKIRQVKIVTLKSNLVSNFRKEFELYKVREINDYHHAHDAYLNAVIGKALLGVYPQLEPEFVYGDYPHFHGHKENKATAKKFFYSNIMNFFKKDDVRTDKNGEIIWKKDEHISNIKKVLSYPQVNIVKKVEEQTGGFSKESILPKGNSDKLIPRKTKKFYWDTKKYGGFDSPIVAYSILVIADIEKGKSKKLKTVKALVGVTIMEKMTFERDPVAFLERKGYRNVQEENIIKLPKYSLFKLENGRKRLLASARELQKGNEIVLPNHLGTLLYHAKNIHKVDEPKHLDYVDKHKDEFKELLDVVSNFSKKYTLAEGNLEKIKELYAQNNGEDLKELASSFINLLTFTAIGAPATFKFFDKNIDRKRYTSTTEILNATLIHQSITGLYETRIDLNKLGGD

SEQ ID NO: 540 - protein, 1345 aa, Streptococcus mutans W6; identical to SEQ ID NO: 464

SEQ ID NO: 541 - protein, 1121 aa, Streptococcus oralis SK1074
MNGLVLGLDIGIASVGVGILEKNSGKIIHANSRLFPAATADNNVERRKNRQARRLNRRKKHRGVRFQDLFEDYGLLTDFSKVSINLNPYRLRVDGLNQQLTNEELFIALKNIVKRRGISYLDDASEDGGAVSSDYGKAVEENRKLLAEQTPGQIQLERFEKYGQVRGDFTVVENGEKCRLINVFSTSAYRKEAEKILRKQQEFNNQITDEFIEDYLKILTGKRKYYHGPGNEKSRTDYGRFRTDGTTLDNIFGVLIGKCTFYPNEYRASKSSYTAQEFNLLNDLNNLTVPTETKKLSEEQKKVIVEYAKEAKTLGASTLLKYIVKMIDASVDQISGYRVDVNNKPEMHTFEVYRKMQSLETISVGELSRNVLDELAHILTLNTEREGIEEAINSKLMGVFSQDQVLELVQFRKNNSSLFSKGWHNFSLKLMMELIPELYETSEEQMTILTRLGKQKSKETSKRTKYIDEKELTEEIYNPVVAKSVRQAIKIINEATKKHGIFDNIVIEMARENNEEDAKKDYIKRQKANQDEKNAAMEKAAFQYNGKKELPGNIFNGHKELATKIRLWHQQGEKCLYTGKTIPISDLIHNQYKYEIDHILPLSLSFDDSLSNKVLVHATANQEKGQRTPFQALDSMDDAWSYREFKSYVKDLKSLSNKKKDYLLTEEDISKIEVKQKFIERNLVDTRYSSRVVLNALQDFYKSHQFDTTISVVRGQFTSQLRRKWGLEKSRETYHHHAVDALIIAASSQLRLWKKQNNPLITYKEGQFVDSQTGEIISLTDDEYKELVFKAPYDHFVDTLHSKTFEDGILFSYQVDSKYNRKISDATIYATRKAKLDKDKSEETYVLGKIKDIYSQAGYDAFIKIYNKDKRKFLMYHKDPQTFEKVIEEILRTYPSKERNDKNKEVPCNPFEKYRQENGPIRKYSKKGNGPEIKCLKYYDNKLGNYIDISPDGSDNQVVLQSLKPWRTDVYFNHQTKEYELMGLKYSDLSFEKGSGKYSISNEKYNSIKRIEGVNEQSEFKFTLYKNDLILIKDSENNEQKLFRFNSRNDTAKHYVELKPYDKARFDGQQELITILGNVAKGGQCLKGLNKSNISIFKVKTDVLGKKHIIKKEGDEPKLKF

SEQ ID NO: 542 - protein, 1373 aa, Streptococcus oralis SK304
MENKNYSIGLDIGTNSVGWAVITDDYKVPSKKMKVLGNTDKRFIKKNLIGALLFDEGTTAEARRLKRTARRRYTRRKNRLRYLQEIFAEEMSKVDSSFFHRLDDSFLIPEDKKGSKYPIFATLIEEKEYHKQFPTIYHLRKQLADSKEKTDLRLIYLALAHMIKYRGHFLYEDTFDIKNNDIQKIFNEFISIYNNTFEGNSLSGQNVQVEAIFTDKISKSAKRERVLKLFPDEKSTGLFSEFLKLIVGNQADFKKHFDLEEKAPLQFSRDTYDEDLENLLGQIGDDFADLFVAAKKLYDAILLSGILTVTDPSTKAPLSASMIERYENHQKDLATLKQFIKTNLPEKYDEVFSDQSKDGYAGYIDGKTTQESFYKYIKNLLSKFEGADYFLEKIEREDFLRKQRTFDNGSIPHQIHLQEMNAILRRQGEHYPFLKENKEKIEKILTFRIPYYVGPLARGNRDFAWLTRNSDQAIRPWNFEEIVDKASSAESFINKMTNYDLYLPEEKVLPKHSLLYETFAVYNELTKVKFIAEGLRDYQFLDSRQKKDIFYTLFKAEDKRKVTEKDIIQYLHTVDGYDGIELKGIEKQFNASLSTYHDLLKIIKDKEFMDDPNNEEILENIVHTLTIFEDREMIKQRLAQYDSLFDEKVIKALTRRHYTGWGKLSSKLINGIRDKQTGKTILDYLMDDGYNNRNFMQLINDDELSFKEIIKKAQVVGKTDDVKQVVQELPGSPAIKKGILQSIKLVDELVKVMGHEPESIVIEMARENQTTARGKKNSQQRYKRIEDSLKILASGLNAKILKEHPTDNIQLQNDRLFLYYLQNGRDMYTGKPLDINQLSSYDIDHIVPQAFIKDDSLDNRVLTSLKDNRGKSDNVPSLEVVEKMKTFWQQLLDSKLISYRKFNNLTKAERGGLDERDKVGFIKRQLVETRQITKHVAQILDARYNTEVNEKDKKNRTVKIITLKSNLVSNFRKEFRLYKIREINDYHHAHDAYLNAVVAKAILKKYPKLEPEFVYGDYQKYDLKRYISRSKDPKEIEKATEKYFFYSNLLNFFKEEVHYADGTIVKRENIEYSKDTGEIAWNKEKDFATIKKVLSLPQVNIVKKREVQTGGFSKESILPKGNSDKLIPRKTKDILWDTTKYGGFDSPVIAYSILLIADIEKGKAKRLKTVKTLVGITIMEKATFEKSPIAFLENKGYHNVRKENILCLPKYSLFELKNGRRRMLASAKELQKGNEIVLPVHLTTLLYHAKNIHRLDEPEHLEYIQKHRNEFKGLLNLVSEFSQKYVLADANLEKIKNLYADNEQADIEILANSFINLLTFTALGAPAAFKFFGKDVDRKRYTTVSEILNATLIHQSITGLYETRIDLSKLGED

SEQ ID NO: 543 - protein, 1134 aa, Streptococcus oralis SK313
MNGLVLGLDIGIASVGVGILEKNSGKIVHASSRIFPAATADNNVERRKNRQARRLHRRKKHRGARLKDLFEYYGLLTDFSKVSINLNPYRLRVDGLDQQLTNEELFIALKNIVKRRGISYLDDASEDGGTVSSDYGKAVEENRKLLAEQTPGQIQLERFEKYGQLRGDFTVVENSEKCRLINVFSTSAYKKEAERILRKQQEFNNQITDEFIEDYLKILTGKRKYYHGPGNEKSRTDYGRFRTDGATLDNIFGILIGKCTFYPNEYRASKASYTAQEFNLLNDLNNLTVPTETKKLSEEQKKTIIEYAKSAKTLGASTLLKYIAKMIDASVDQIRGYRVDVNNKPEMHTFEVYRKMQSLETISVGELSRNILDELAHILTLNTEREGIEEAINTKLRDSFSQDQVLELVQFRKNNSSLFSKGWHNFSLKLMMELIPELYETSEEQMTILTRLGKQKSKETSKRTKYIDEKEVTEEIYNPVVAKSVRQAIKIINEATKKHGIFDNIVIEMARENNEEDAKKDYIKRQKANQDEKYAAMEKAAFQYNGKKELPDNIFHGHKELATKIRLWHQQGEKCLYTGKSIPISDLIHNQYKYEIDHILPLSLSFDDSLSNKVLVLATANQEKGQRTPFQALDSMDDAWSYREFKSYVKESKLLGNKKKEYLLTEEDISKIEVKQKFIERNLVDTRYSSRVVLNALQDFYKNHNFDTTISVVRGQFTSQLRRKWGLEKSRETYHHHAVDALIIAASSQLRLWKKQNNPLIAYKEGQFVDSQTGEIISLTDDEYKELVFKAPYDHFVDTLSSKTFEDSILFSYQVDSKFNRKISDATIYATRKAKLDKEKKEYTYTLGKIKDIYSLGTKTPSKTGFYKFLDLYNKDKSQFLMFQKDRKTWDEVIEKIMEQYRPFKEYDKAGKLVDFNPFEKYRQENGPIRKYSKKGNGPEIKSLKYYDILLGKHKNITPEGSRNTVALLSLNPWRTDVYYNMETKKYEFLGLKYADLPFEEGGAYGISTETYNELREKEGIGKNSEFKFTLYKNDLILIKDTETNCQQFFRFWSRTGKDNPKSFEKHKIELKPYEKAKFEKGEELEVLGKVPPSSNQFQKNMQIENLSIYKVKTDVLGNKHFIKKEGDKPKLKF

SEQ ID NO: 544 - protein, 1371 aa, Streptococcus oralis SK610
MENKNYSIGLDIGTNSVGWSVITDDYKVPSKKMKVLGNTDKRFIKKNLIGALLFDEGTTAEARRLKRTARRRYTRRKNRLRYLQEIFAEEMSKVDSSFFHRLDDSFLIPEDKRGSKYPIFATLAEEKEYHKQFPTIYHLRKQLADSKEKTDLRLIYLALAHMIKYRGHFLYEDTFDIKNNDIQKIFSEFISIYDNTFEGSSLSGQNAQVEAIFTDKISKSAKRERVLKLFPDEKSTGLFSEFLKLIVGNQADFKKHFDLGEKAPLQFSKDTYDEDLENLLGQIGDDFADLFLVAKKLYDAILLSGILTVTDPSTKAPLSASMIERYENHQKDLAVLKQFIKNNLPEKYDEVFSDQSKDGYAGYIDGKTTQEAFYKYIKNLLSKFEGTDYFLEKIEREDFLRKQRTFDNGSIPHQIHLQEMNAILRRQGEHYPFLKDNKEKIEKILTFRIPYYVGPLARGNRDFAWLTRNSDEAIRPWNFEEIVDKASSAEDFINKMTNYDLYLPEEKVLPKHSLLYETFAVYNELTKVKFIAEGLRDYQFLDSGQKKQIVTQLFKEKRKVTEKDIIQFLHNVDGYDGIELKGIEKQFNASLSTYHDLLKIIKDKEFMDDSKNEEILENIVHTLTIFEDREMIKQRLAQYDSLFDEKVIKALIRRHYTGWGKLSAKLIDGICDKQTGNTILDYLIDDGKNNRNFMQLINDDGLSFKEITQKAQVVGKTDDVKQVVQELPGSPAIKKGILQSIKIVDELVKVMGHTPESIVIEMARENQTTARGKKNSQQRYKRIEDALKNLASGLDSNILKEHPTNNIQLQNDRLFLYYLQNGRDMYTGKPLDINQLSSYDIDHIVPQAFIKDDSLDNRVLTSLKDNRGKSDNVPSIEVVQKRKAFWQQLLDSKLISERKFNNLTKAERGGLDERDKVGFIKRQLVETRQITKHVAQILDARFNKEVNEKDKKNRTVKIITLKSNLVSNFRKEFRLYKVREINDYHHAHDAYLNAVVAKAILKKYPKLEPEFVYGDYQKYDLKRYISRSRNPKEVEKATEKYFFYSNLLNFFKEEVHYADGTIVKRENIEYSKDTGEIAWNKEKDFATIKKVLSYPQVNIVKKREVQTGGFSKESILPKGNSDKLIPRKTKDILWETTKYGGFDSPVIAYSILLIADIEKGKAKKLKTVKTLVGITIMEKAAFEENPITFLENKGYHNVRKENILCLPKYSLFELENGRRRLLASAKELQKGNEIVLPVYLTTLLYHSKNVHKLDEPEHLEYIQKHRNEFKDLLNLVSEFSQKYVLADANLEKIQNLYADNEQADIEILANSFINLLTFTALGAPAAFKFFGKDIDRKRYTTVSEILNATLIHQSITGLYETRIDLSKLGED

SEQ ID NO: 545 - protein, 1140 aa, Streptococcus parasanguinis F0449
MNGLVLGLDIGIASVGVGILKKDIGEIIHTNSRLFSAATADSNIERRGHRGGKRLTRRKKHRSIRLHDLFEDFGLLTDFSKVSINLNPYQLRVQGLDNQLTNEELFIALKNIVKRRGISYLDDASEDGGTVSSDYGKAVEENRKLLAEQTPGQIQLDRFEKYGQVRGDFNVVENGEKRRLINVFTTSAYSKEAERILRKQQEFNKKITDEFIEDYLTILTGKRKYYHGPGNEKSRTDYGRYTTKKDPEGKYITLDNIFGILIGKCTFYPDEYRASKASYTAQEFNLLNDLNNLTVPTETKKLSEEQKKTIIKYAKTAKTLGASTLLKYIAKLIGASVDQIHGYRIDPNKKPEMHTFETYRKMQSLETISVEELPRKVLDELAHILTLNTEREGIEEAINATLKDTFSQDQVLELVQFRKNNSSLFSKGWHSFSLKLMMELIPELYETSEEQMTILTRLGKQKSKETSKRTKYIDEKELTEEIYNPVVAKSVRQAIKIINEATKKYGIFDNIVIEMARENNEEDAKKEYIKRQKANLDEKNAAMEKAAFQYNGKKELPDNVFHGHKELATKIRLWHQQGEKCLYTGKNIPISDLIQNQYKYEIDHILPLSLSFDDSLSNKVLVLATANQEKGQRTPFQALDSMDDAWSYREFKSYVKDSKLLGNKKKEYLLTEEDISKIEVKQKFIERNLVDTRYSSRVVLNALQDFYKEHQFDTTISVVRGQFTSQLRRKWGLEKSRETYHHHAVDALIIAASSQLRLWKKQNNPLISYTEGQFVDQVTGEIISLSDDEYKELVFKAPYDHFVDTLKSKKFEDSILFSYQVDSKYNRKISDATIYATRKAKLDKENKEYTYTLGKIKDIYALGTKSPSKTGFYKFLDLYNKDKSQFLMFQKDRKTWDEVIEKIIEQYRPFKEYDENGKEVDFNPFEKYRIENGPIRKYSKKGNGPEIKSLKYYDNLLGKFVDITPSESKNPVALLSLNPWRTDVYYNTETSKYEFLGLKYADLCFEKGGAYGISEVKYNKIREKEGIGKESEFKFTLYKNDLILIKDTETNCQQIFRFWSRTGKDNPKSFEKHKIELKPYEKARFEKGEELEVLGKVPPSSNQLQKNMQIENLSIYKVKTDVLGNKHFIKKEGEEPKLKF

SEQ ID NO: 546 - protein, 1130 aa, Streptococcus pasteurianus
MTNGKILGLDIGIASVGVGIIEAKTGKVVHANSRLFSAANAENNAERRGFRGSRRLNRRKKHRVKRVRDLFEKYGIVTDFRNLNLNPYELRVKGLTEQLKNEELFAALRTISKRRGISYLDDAEDDSTGSTDYAKSIDENRRLLKNKTPGQIQLERLEKYGQLRGNFTVYDENGEAHRLINVFSTSDYEKEARKILETQADYNKKITAEFIDDYVEILTQKRKYYHGPGNEKSRTDYGRFRTDGTTLENIFGILIGKCNFYPDEYRASKASYTAQEYNFLNDLNNLKVSTETGKLSTEQKESLVEFAKNTATLGPAKLLKEIAKILDCKVDEIKGYREDDKGKPDLHTFEPYRKLKFNLESINIDDLSREVIDKLADILTLNTEREGIEDAIKRNLPNQFTEEQISEIIKVRKSQSTAFNKGWHSFSAKLMNELIPELYATSDEQMTILTRLEKFKVNKKSSKNTKTIDEKEVTDEIYNPVVAKSVRQTIKIINAAVKKYGDFDKIVIEMPRDKNADDEKKFIDKRNKENKKEKDDALKRAAYLYNSSDKLPDEVFHGNKQLETKIRLWYQQGERCLYSGKPISIQELVHNSNNFEIDHILPLSLSFDDSLANKVLVYAWTNQEKGQKTPYQVIDSMDAAWSFREMKDYVLKQKGLGKKKRDYLLTTENIDKIEVKKKFIERNLVDTRYASRVVLNSLQSALRELGKDTKVSVVRGQFTSQLRRKWKIDKSRETYHHHAVDALIIAASSQLKLWEKQDNPMFVDYGKNQVVDKQTGEILSVSDDEYKELVFQPPYQGFVNTISSKGFEDEILFSYQVDSKYNRKVSDATIYSTRKAKIGKDKKEETYVLGKIKDIYSQNGFDTFIKKYNKDKTQFLMYQKDSLTWENVIEVILRDYPTTKKSEDGKNDVKCNPFEEYRRENGLICKYSKKGKGTPIKSLKYYDKKLGNCIDITPEESRNKVILQSINPWRADVYFNPETLKYELMGLKYSDLSFEKGTGNYHISQEKYDAIKEKEGIGKKSEFKFTLYRNDLILIKDIASGEQEIYRFLSRTMPNVNHYVELKPYDKEKFDNVQELVEALGEADKVGRCIKGLNKPNISIYKVRTDVLGNKYFVKKKGDKPKLDFKNNKK

SEQ ID NO: 547 - protein, 1374 aa, Streptococcus pseudoporcinus LQ 940-04
MKKRYSYSIGLDIGTNSVGWAVINEDYKVPAKKMTVFGNTDRKTIKKNLLGTVLFDSGETAQARRLKRTNRRRYTRRRYRLCQLQNIFATEMVKVDDTFFQRLSESFFYYQDKAFDKHPIFGNSKEERAYHKTYPTIYHLRKDLADRDQKADLRLIYLALSHIIKFRGHFLIEGKLNSENTDVQKLFIALVTVYNLLFEEEPIAGETCDAKALLTAKTSKSKRLESLISEFPGQKKNGLFGNLLALALGLRPNFKSNFGLSEDAKLQITKDTYEEELDNLLAEIGDHYADLFLAAKNLSDAILLSDILTLSDENTRAPLSASMIKRYEEHQEDLALLKKLVKEQMPEKYWEIFSNAKKNGYAGYIEGKVSQEDFYRYIKPILSRLKGGDEFLAKIDRDDFLRKQRTFDNGSIPHQIHLKELHAILRRQEKYYPFLAEQKEKIEQLLCFRIPYYVGPLAKGGNSSFAWLKRRSDEPITPWNFKDVVDEEASAQAFIEGMTNYDTYLPEEKVLPKHSPLYEMFTVYNELTKVKYIAENMTKPLYLSAEQKEAIIDHLFKQTRKVTVKDLKEKYFSQIEGLENVDVTGVEGAFNASLGTYNDLLKIIKDKAFLDDEANAEILEEIVLILTLFQDEKLIEKRLAKYANLFEKSVLKKLRKRHYRGWGRLSRQLIDGMKDKASGKTILDFLKADDFANRNFIQLINDSSLDFEKLIDDAQKKAIKRESLTEAVANLAGSPAIKKGILQSLKVVDEIVKVMGHNPDNIVIEMSRENQTTAQGLKNARQRLKKIKEVHKKTGSRILEDNSERITNLTLQDNRLYLYLLQDGKDMYTGQDLDINNLSQYDIDHIIPQSFIKDNSIDNLVLTTQKANRGKSDNVPSIEVVRDMKDRVWRRQLANGAISRQKFDHLTKAERGGLADSDKARFLRRQLVETRQITKHVAQLLDSRFNSKSNQNKKLARNVKIITLKSKIVSDFRKDFGLYKLREVNNYHHAHDAYLNAVVGTALLKKYPKLEAEFVYGDYKHFDLVKLISKSDPSLGKATAKVFFYSNIMNFFKEELSLADGTLMKRPVIETNTETGEVVWDKVKDFKTIRKVLSYPQVNIVKKTEIQSGAFSKESVLSKGNSDKLIERKKGWDPKKYGGFDSPNTAYSIFVVAKVAKRKAQKLKTVKEIVGITIMEQAEYEKDNIAFLEKKGYQDIQEKLLIKLPKYSLFELENGRRRLLASANEFQKGNELALSGKYMKFLYLASRYDKLSSKIESEQQKKLFVEQHLHYFDEILDIVVKHATCYIKAENNLKKIISLYKKKEAYSINEQALNMLNLFIFTSLGAPSTFVFFDETIDRKRYTTSSDVLNGILIQQSITGLYETRIDLSRFGGD

SEQ ID NO: 548 - protein, 1368 aa, Streptococcus pyogenes MGAS10270
MDKKYSIGLDIGTNSVGWAVITDDYKVPSKKFKVLGNTDRHSIKKNLIGALLFDSGETAEATRLKRTARRRYTRRKNRICYLQEIFSNEMAKVDDSFFHRLEESFLVEEDKKHERHPIFGNIVDEVAYHEKYPTIYHLRKKLVDSTDKADLRLIYLALAHMIKFRGHFLIEGDLNPDNSDVDKLFIQLVQTYNQLFEENPINASGVDAKAILSARLSKSRRLENLIAQLPGEKKNGLFGNLIALSLGLTPNFKSNFDLAEDAKLQLSKDTYDDDLDNLLAQIGDQYADLFLAAKNLSDAILLSDILRLNSEITKAPLSASMIKRYDEHHQDLTLLKALVRQQLPEKYKEIFFDQSKNGYAGYIDGGASQEEFYKFIKPILEKMDGTEELLAKLNREDLLRKQRTFDNGSIPHQIHLGELHAILRRQEDFYPFLKDNREKIEKILTFRIPYYVGPLARGNSRFAWMTRKSEETITPWNFEEVVDKGASAQSFIERMTNFDKNLPNEKVLPKHSLLYEYFTVYNELTKVKYVTEGMRKPAFLSGEQKKAIVDLLFKTNRKVTVKQLKEDYFKKIECFDSVEISGVEDRFNASLGTYHDLLKIIKDKDFLDNEENEDILEDIVLTLTLFEDREMIEERLKTYAHLFDDKVMKQLKRRRYTGWGRLSRKLINGIRDKQSGKTILDFLKSDGFANRNFMQLIHDDSLTFKEDIQKAQVSGQGDSLHEHIANLAGSPAIKKGILQTVKVVDELVKVMGRHKPENIVIEMARENQTTQKGQKNSRERMKRIEEGIKELGSQILKEHPVENTQLQNEKLYLYYLQNGRDMYVDQELDINRLSDYDVDHIVPQSFIKDDSIDNKVLTRSDKNRGKSDNVPSEEVVKKMKNYWRQLLNAKLITQRKFDNLTKAERGGLSELDKAGFIKRQLVETRQITKHVAQILDSRMNTKYDENDKLIREVKVITLKSKLVSDFRKDFQFYKVREINNYHHAHDAYLNAVVGTALIKKYPKLESEFVYGDYKVYDVRKMIAKSEQEIGKATAKYFFYSNIMNFFKTEITLANGEIRKRPLIETNGETGEIVWDKGRDFATVRKVLSMPQVNIVKKTEVQTGGFSKESILPKRNSDKLIARKKDWDPKKYGGFDSPTVAYSVLVVAKVEKGKSKKLKSVKELLGLTIMERSSFEKNPIDFLEAKGYKEVKKDLIIKLPKYSLFELENGRKRMLASAGELQKGNELALPSKYVNFLYLASHYEKLKGSPEDNEQKQLFVEQHKHYLDEIIEQISEFSKRVILADANLDKVLSAYNKHRDKPIREQAENIIHLFTLTNLGAPAAFKYFDTTIDRKRYTSTKEVLDATLIHQSITGLYETRIDLSQLGGD

SEQ ID NO: 549 - protein, 1371 aa, Streptococcus pyogenes
MDKKYSIGLDIGTNSVGWAVITDDYKVPSKKFKVLGNTDRHSIKKNLIGALLFDSGETAEATRLKRTARRRYTRRKNRICYLQEIFSNEMAKVDDSFFHRLEESFLVEEDKKHERHPIFGNIVDEVAYHEKYPTIYHLRKKLADSTDKADLRLIYLALAHMIKFRGHFLIEGDLNPDNSDVDKLFIQLVQTYNQLFEENPINASRVDAKAILSARLSKSRRLENLIAQLPGEKKNGLFGNLIALSLGLTPNFKSNFDLAEDAKLQLSKDTYDDDLDNLLAQIGDQYADLFLAAKNLSDATLLSDILRVNSEITKAPLSASMIKRYDEHHQDLTLLKALVRQQLPEKYKEIFFDQSKNGYAGYIDGGASQEEFYKFIKPILEKMDGTEELLAKLNREDLLRKQRTFDNGSIPHQIHLGELHAILRRQEDFYPFLKDNREKIEKILTFRIPYYVGPLARGNSRFAWMTRKSEETITPWNFEEVVDKGASAQSFIERMTNFDKNLPNEKVLPKHSLLYEYFTVYNELTKVKYVTEGMRKPAFLSGEQKKAIVDLLFKTNRKVTVKQLKEDYFKKIECFDSVEISGVEDRFNASLGTYHDLLKIIKDKDFLDNEENEDILEDIVLTLTLFEDKEMIEERLKTYAHLFDDKVMKQLKRRHYTGWGRLSRKLINGIRDKQSGKTILDFLKSDGFANRNFIQLIHDDSLTFKEAIQKAQVSGQGHSLHEQIANLAGSPAIKKGILQSVKVVDELVKVMGHKPENIVIEMARENQTTQKGQKNSRERMKRIEEGIKELGSQILKEHPVENTQLQNEKLYLYYLQNGRDMYVDQELDINRLSDYDVDHIVPQSFIKDDSIDNKVLTRSDKNRGKSDDVPSEEVVKKMKNYWRQLLNAKLITQRKFDNLTKAERGGLSELDKAGFIKRQLVETRQITKHVAQILDSRMNTKYDENDKLIREVKVITLKSKLVSDFRKDFQFYKVREINNYHHAHDAYLNAVVGTALIKKYPKLESEFVYGDYKVYDVRKMIAKSEQEIGKATAKRFFYSNIMNFFKTEITLANGEIRKRPLIETNEETGEIVWDKGRDFATVRKVLSMPQVNIVKKTEVQTGALTNESIYARGSFDKLISRKHRFESSKYGGFGSPTVTYSVLVVAKSKVQDGKVKKIKTGKELIGITLLDKLVFEKNPLKFIEDKGYGNVQIDKCIKLPKYSLFEFENGTRRMLASVMANNNSRGDLQKANEMFLPAKLVTLLYHAHKIESSKELEHEAYILDHYNDLYQLLSYIERFASLYVDVEKNISKVKELFSNIESYSISEICSSVINLLTLTASGAPADFKFLGTTIPRKRYGSPQSILSSTLIHQSITGLYETRIDLSQLGSD

SEQ ID NO: 550 - protein, 1367 aa, Streptococcus pyogenes
MDKKYSIGLDIGTNSVGWAVITDDYKVPSKKFKVLGNTDRHSIKKNLIGALLFGSGETAEATRLKRTARRRYTRRKNRICYLQEIFSNEMAKVDDSFFHRLEESFLVEEDKKHERHPIFGNIVDEVAYHEKYPTIYHLRKKLADSTDKADLRLIYLALAHMIKFRGHFLIEGDLNPDNSDVDKLFIQLVQIYNQLFEENPINASRVDAKAILSARLSKSRRLENLIAQLPGEKRNGLFGNLIALSLGLTPNFKSNFDLAEDAKLQLSKDTYDDDLDNLLAQIGDQYADLFLAAKNLSDAILLSDILRVNSEITKAPLSASMIKRYDEHHQDLTLLKALVRQQLPEKYKEIFFDQSKNGYAGYIDGGASQEEFYKFIKPILEKMDGTEELLVKLNREDLLRKQRTFDNGSIPHQIHLGELHAILRRQEDFYPFLKDNREKIEKILTFRIPYYVGPLARGNSRFAWMTRKSEETITPWNFEEVVDKGASAQSFIERMTNFDKNLPNEKVLPKHSLLYEYFTVYNELTKVKYVTEGMRKPAFLSGEQKKAIVDLLFKTNRKVTVKQLKEDYFKKIECFDSVEISGVEDRFNASLGAYHDLLKIIKDKDFLDNEENEDILEDIVLTLTLFEDRGMIEERLKTYAHLFDDKVMKQLKRRRYTGWGRLSRKLINGIRDKQSGKTILDFLKSDGFANRNFMQLIHDDSLTFKEDIQKAQVSGQGHSLHEQIANLAGSPAIKKGILQTVKIVDELVKVMGHKPENIVIEMARENQTTQKGQKNSRERMKRIEEGIKELGSQILKEHPVENTQLQNEKLYLYYLQNGRDMYVDQELDINRLSDYDVDHIVPQSFIKDDSIDNKVLTRSDKNRGKSDNVPSEEVVKKMKNYWRQLLNAKLITQRKFDNLTKAERGGLSELDKAGFIKRQLVETRQITKHVAQILDSRMNTKYDENDKLIREVKVITLKSKLVSDFRKDFQFYKVREINNYHHAHDAYLNAVVGTALIKKYPKLESEFVYGDYKVYDVRKMIAKSEQEIGKATAKYFFYSNIMNFFKTEITLANGEIRKRPLIETNGETGEIVWDKGRDFATVRKVLSMPQVNIVKKTEVQTGGFSKESILPKRNSDKLIARKKDWDPKKYGGFDSPTVAYSVLVVAKVEKGKSKKLKSVKELLGITIMERSSFEKNPIDFLEAKGYKEVKKDLIIKLPKYSLFELENGRKRMLASAGELQKGNELALPSKYVNFLYLASHYEKLKGSPEDNEQKQLFVEQHKHYLDEIIEQISEFSKRVILADANLDKVLSAYNKHRDKPIREQAENIIHLFTLTNLGAPAAFKYFDTTIDRKRYTSTKEVLDATLIHQSITGLYETRIDLSQLGGD

SEQ ID NO: 551 - protein, 1368 aa, Streptococcus
MDKKYSIGLDIGTNSVGWAVITDDYKVPSKKFKVLGNTDRHSIKKNLIGALLFDSGEIAEATRLKRTARRRYTRRKNRICYLQEIFSNEMAKVDDSFFHRLEESFLVEEDKKHERHPIFGNIVDEVAYHEKYPTIYHLRKKLVDSTDKADLRLIYLALAHMIKFRGHFLIEGDLNPDNSDVDKLFIQLVQTYNQLFEENPINASGVDAKAILSARLSKSRRLENLIAQLPGEKKNGLFGNLIALSLGLTPNFKSNFDLAEDAKLQLSKDTYDDDLDNLLAQIGDQYADLFLAAKNLSDAILLSDILRLNSEITKAPLSASMIKRYDEHHQDLTLLKALVRQQLPEKYKEIFFDQSKNGYAGYIDGGASQEEFYKFIKPILEKMDGTEELLAKLNREDLLRKQRTFDNGSIPHQIHLGELHAILRRQEDFYPFLKDNREKIEKILTFRIPYYVGPLARGNSRFAWMTRKSEETITPWNFEEVVDKGASAQSFIERMTNFDKNLPNEKVLPKHSLLYEYFTVYNELTKVKYVTEGMRKPAFLSGEQKKAIVDLLFKTNRKVTVKQLKEDYFKKIECFDSVEISGVEDRFNASLGTYHDLLKIIKDKDFLDNEENEDILEDIVLTLTLFEDREMIEERLKTYAHLFDDKVMKQLKRRRYTGWGRLSRKLINGIRDKQSGKTILDFLKSDGFANRNFMQLIHDDSLTFKEDIQKAQVSGQGDSLHEHIANLAGSPAIKKGILQTVKVVDELVKVMGRHKPENIVIEMARENQTTQKGQKNSRERMKRIEEGIKELGSQILKEHPVENTQLQNEKLYLYYLQNGRDMYVDQELDINRLSDYDVDHIVPQSFIKDDSIDNKVLTRSDKNRGKSDNVPSEEVVKKMKNYWRQLLNAKLITQRKFDNLTKAERGGLSELDKAGFIKRQLVETRQITKHVAQILDSRMNTKYDENDKLIREVKVITLKSKLVSDFRKDFQFYKVREINNYHHAHDAYLNAVVGTALIKKYPKLESEFVYGDYKVYDVRKMLAKSEQEIGKATAKYFFYSNIMNFFKTEITLANGEIRKRPLIETNGETGEIVWDKGRDFATVRKVLSMPQVNIVKKTEVQTGGFSKESILPKRNSDKLIARKKDWDPKKYGGFDSPTVAYSVLVVAKVEKGKSKKLKSVKELLGITIMERSSFEKNPIDFLEAKGYKEVRKDLIIKLPKYSLFELENGRKRMLASAGELQKGNELALPSKYVNFLYLASHYEKLKGSPEDNEQKQLFVEQHKHYLDEIIEQISEFSKRVILADANLDKVLSAYNKHRDKPIREQAENIIHLFTLTNLGAPTAFKYFDTTIDRKRYTSTKEVLDATFIHQSITGLYETRIDLSQLGGD

SEQ ID NO: 552 - protein, 1368 aa, Streptococcus pyogenes
MDKKYSIGLDIGTNSVGWAVITDDYKVPSKKLKGLGNTDRHGIKKNLIGALLFDSGETAEATRLKRTARRRYTRRKNRICYLQEIFSNEMAKVDDSFFHRLEESFLVEEDKKHERHPIFGNIVDEVAYHEKYPTIYHLRKKLADSTDKVDLRLIYLALAHMIKFRGHFLIEGDLNPDNSDVDKLFIQLVQTYNQLFEENPINASRVDAKAILSARLSKSRRLENLIAQLPGEKKNGLFGNLIALSLGLTPNFKSNFDLAEDAKLQLSKDTYDDDLDNLLAQIGDQYADLFLAAKNLSDATLLSDILRVNSEITKAPLSASMIKRYDEHHQDLTLLKALVRQQLPEKYKEIFFDQSKNGYAGYIDGGASQEEFYKFIKPILEKMDGTEELLAKLNREDLLRKQRTFDNGSIPYQIHLGELHAILRRQEDFYPFLKDNREKIEKILTFRIPYYVGPLARGNSRFAWMTRKSEETITPWNFEEVVDKGASAQSFIERMTNFDKNLPNEKVLPKHSLLYEYFTVYNELTKVKYVTEGMRKPAFLSGEQKKAIVDLLFKTNRKVTVKQLKEDYFKKIECFDSVEISGVEDRFNASLGTYHDLLKIIKDKDFLDNEENEDILEDIVLTLTLFEDREMIEERLKTYAHLFDDKVMKQLKRRRYTGWGRLSRKLINGIRDKQSGKTILDFLKSDGFANRNFMQLIHDDSLTFKEDIQKAQVSGQGDSLHEHIANLAGSPAIKKGILQTVKVVDELVKVMGRHKPENIVIEMARENQTTQKGQKNSRERMKRIEEGIKELGSDILKEYPVENTQLQNEKLYLYYLQNGRDMYVDQELDINRLSDYDVDHIVPQSFLKDDSIDNKVLTRSDKNRGKSDNVPSEEVVKKMKNYWRQLLNAKLITQRKFDNLTKAERGGLSELDKVGFIKRQLVETRQITKHVAQILDSRMNTKYDENDKLIREVRVITLKSKLVSDFRKDFQFYKVREINNYHHAHDAYLNAVVGTALIKKYPKLESEFVYGDYKVYDVRKMIAKSEQEIGKATAKYFFYSNIMNFFKTEITLANGEIRKRPLIETNGETGEIVWDKGRDFATVRKVLSMPQVNIVKKTEVQTGGFSKESILPKRNSDKLIARKKDWDPKKYGGFDSPTVAYSVLVVAKVEKGKSKKLKSVKELLGITIMERSSFEKDPIDFLEAKGYKEVRKDLIIKLPKYSLFELENGRKRMLASAGELQKGNELALPSKYVNFLYLASHYEKLKGSPEDNEQKQLFVEQHKHYLDEIIEQISEFSKRVILADANLDKVLSAYNKHRDKPIREQAENIIHLFTLTNLGAPAAFKYFDTTIDRKRYTSTKEVLDATLIHQSITGLYETRIDLSQLGGD

SEQ ID NO: 553 - protein, 1368 aa, Streptococcus pyogenes
MDKKYSIGLDIGTNSVGWAVITDDYKVPSKKFKVLGNTDRHSIKKNLIGALLFDSGETAEATRLKRTARRRYTRRKNRICYLQEIFSNEMAKVDDSFFHRLEESFLVEEDKKHERHPIFGNIVDEVAYHEKYPTIYHLRKKLVDSTDKADLRLIYLALAHMIKFRGHFLIEGDLNPDNSDVDKLFIQLVQTYNQLFEENPINASGVDAKAILSARLSKSRRLENLIAQLPGEKKNGLFGNLIALSLGLTPNFKSNFDLAEDAKLQLSKDTYDDDLDNLLAQIGDQYADLFLAAKNLSDAILLSDILRVNTEITKAPLSASMIKRYDEHHQDLTLLKALVRQQLPEKYKEIFFDQSKNGYAGYIDGGASQEEFYKFIKPILEKMDGTEELLVKLNREDLLRKQRTFDNGSIPHQIHLGELHAILRRQEDFYPFLKDNREKIEKILTFRIPYYVGPLARGNSRFAWMTRKSEETITPWNFEEVVDKGASAQSFIERMTNFDKNLPNEKVLPKHSLLYEYFTVYNELTKVKYVTEGMRKPAFLSGEQKKAIVDLLFKTNRKVTVKQLKEDYFKKIECFDSVEISGVEDRFNASLGTYHDLLKIIKDKDFLDNEENEDILEDIVLTLTLFEDREMIEERLKTYAHLFDDKVMKQLKRRRYTGWGRLSRKLINGIRDKQSGKTILDFLKSDGFANRNFMQLIHDDSLTFKEDIQKAQVSGQGDSLHEHIANLAGSPAIKKGILQTVKVVDELVKVMGRHKPENIVIEMARENQTTQKGQKNSRERMKRIEEGIKELGSQILKEHPVENTQLQNEKLYLYYLQNGRDMYVDQELDINRLSDYDVDHIVPQSFLKDDSIDNKVLTRSDKNRGKSDNVPSEEVVKKMKNYWRQLLNAKLITQRKFDNLTKAERGGLSELDKAGFIKRQLVETRQITKHVAQILDSRMNTKYDENDKLIREVKVITLKSKLVSDFRKDFQFYKVREINNYHHAHDAYLNAVVGTALIKKYPKLESEFVYGDYKVYDVRKMIAKSEQEIGKATAKYFFYSNIMNFFKTEITLANGEIRKRPLIETNGETGEIVWDKGRDFATVRKVLSMPQVNIVKKTEVQTGGFSKESILPKRNSDKLIARKKDWDPKKYGGFDSPTVAYSVLVVAKVEKGKSKKLKSVKELLGITIMERSSFEKNPIDFLEAKGYKEVKKDLIIKLPKYSLFELENGRKRMLASAGELQKGNELALPSKYVNFLYLASHYEKLKGSPEDNEQKQLFVEQHKHYLDEIIEQISEFSKRVILADANLDKVLSAYNKHRDKPIREQAENIIHLFTLTNLGAPAAFKYFDTTIDRKRYTSTKEVLDATLIHQSITGLYETRIDLSQLGGD

SEQ ID NO: 554 - protein, 1368 aa, Streptococcus pyogenes
MDKKYSIGLDIGTNSVGWAVITDDYKVPSKKFKVLGNTDRHSIKKNLIGALLFDSGETAEATRLKRTARRRYTRRKNRICYLQEIFSNEMAKVDDSFFHRLEESFLVEEDKKHERHPIFGNIVDEVAYHEKYPTIYHLRKKLVDSTDKADLRLIYLALAHMIKFRGHFLIEGDLNPDNSDVDKLFIQLVQTYNQLFEENPINASGVDAKAILSARLSKSRRLENLIAQLPGEKKNGLFGNLIALSLGLTPNFKSNFDLAEDAKLQLSKDTYDDDLDNLLAQIGDQYADLFLAAKNLSDAILLSDILRLNSEITKAPLSASMIKRYDEHHQDLTLLKALVRQQLPEKYKEIFFDQSKNGYAGYIDGGASQEEFYKFIKPILEKMDGTEELLAKLNREDLLRKQRTFDNGSIPHQIHLGELHAILRRQEDFYPFLKDNREKIEKILTFRIPYYVGPLARGNSRFAWMTRKSEETITPWNFEEVVDKGASAQSFIERMTNFDKNLPNEKVLPKHSLLYEYFTVYNELTKVKYVTEGMRKPAFLSGEQKKAIVDLLFKTNRKVTVKQLKEDYFKKIECFDSVEISGVEDRFNASLGTYHDLLKIIKDKDFLDNEENEDILEDIVLTLTLFEDREMIEERLKTYAHLFDDKVMKQLKRRRYTGWGRLSRKLINGIRDKQSGKTILDFLKSDGFANRNFMQLIHDDSLTFKEDIQKAQVSGQGDSLHEHIANLAGSPAIKKGILQTVKVVDELVKVMGRHKPENIVIEMARENQTTQKGQKNSRERMKRIEEGIKELGSQILKEHPVENTQLQNEKLYLYYLQNGRDMYVDQELDINRLSDYDVDHIVPQSFIKDDSIDNKVLTRSDKNRGKSNNVPSEEVVKKMKNYWRQLLNAKLITQRKFDNLTKAERGGLSELDKAGFIKRQLVETRQITKHVAQILDSRMNTKYDENDKLIREVKVITLKSKLVSDFRKDFQFYKVREINNYHHAHDAYLNAVVGTALIKKYPKLESEFVYGDYKVYDVRKMIAKSEQEIGKATAKYFFYSNIMNFFKTEITLANGEIRKRPLIETNGETGEIVWDKGRDFATVRKVLSMPQVNIVKKTEVQTGGFSKESILPKRNSDKLIARKKDWDPKKYGGFDSPTVAYSVLVVAKVEKGKSKKLKSVKELLGITIMERSSFEKNPIDFLEAKGYKEVRKDLIVKLPKYSLFELENGRKRMLASAGELQKGNELALPSKYVNFLYLASHYEKLKGSPEDNEQKQLFVEQHKHYLDEIIEQISEFSKRVILADANLDKVLSAYNKHRDKPIREQAENIIHLFTLTNLGAPAAFKYFDTTIDRKRYTSTKEVLDATFIHQSITGLYETRIDLSQLGGD

SEQ ID NO: 555 - protein, 1368 aa, Streptococcus pyogenes
MDKKYSIGLDIGTNSVGWAVITDDYKVPSKKFKVLGNTDRHSIKKNLIGALLFDSGEIAEATRLKRTARRRYTRRKNRICYLQEIFSNEMAKVDDSFFHRLEESFLVEEDKKHERHPIFGNIVDEVAYHEKYPTIYHLRKKLVDSTDKADLRLIYLALAHMIKFRGHFLIEGDLNPDNSDVDKLFIQLVQTYNQLFEENPINASGVDAKAILSARLSKSRRLENLIAQLPGEKKNGLFGNLIALSLGLTPNFKSNFDLAEDAKLQLSKDTYDDDLDNLLAQIGDQYADLFLAAKNLSDAILLSDILRLNSEITKAPLSASMIKRYDEHHQDLTLLKALVRQQLPEKYKEIFFDQSKNGYAGYIDGGASQEEFYKFIKPILEKMDGTEELLAKLNREDLLRKQRTFDNGSIPHQIHLGELHAILRRQEDFYPFLKDNREKIEKILTFRIPYYVGPLARGNSRFAWMTRKSEETITPWNFEEVVDKGASAQSFIERMTNFDKNLPNEKVLPKHSLLYEYFTVYNELTKVKYVTEGMRKPAFLSGEQKKAIVDLLFKTNRKVTVKQLKEDYFKKIECFDSVEISGVEDRFNASLGTYHDLLKIIKDKDFLDNEENEDILEDIVLTLTLFEDREMIEERLKTYAHLFDDKVMKQLKRRRYTVWGRLSRKLINGIRDKQSGKTILDFLKSDGFANRNFMQLIHDDSLTFKEDIQKAQVSGQGDSLHEHIANLAGSPAIKKGILQTVKVVDELVKVMGRHKPENIVIEMARENQTTQKGQKNSRERMKRIEEGIKELGSQILKEHPVENTQLQNEKLYLYYLQNGRDMYVDQELDINRLSDYDVDHIVPQSFIKDDSIDNKVLTRSDKNRGKSDNVPSEEVVKKMKNYWRQLLNAKLITQRKFDNLTKAERGGLSELDKAGFIKRQLVETRQITKHVAQILDSRMNTKYDENDKLIREVKVITLKSKLVSDFRKDFQFYKVREINNYHHAHDAYLNAVVGTALIKKYPKLESEFVYGDYKVYDVRKMLAKSEQEIGKATAKYFFYSNIMNFFKTEITLANGEIRKRPLIETNGETGEIVWDKGRDFATVRKVLSMPQVNIVKKTEVQTGGFSKESILPKRNSDKLIARKKDWDPKKYGGFDSPTVAYSVLVVAKVEKGKSKKLKSVKELLGITIMERSSFEKNPIDFLEAKGYKEVRKDLIIKLPKYSLFELENGRKRMLASAGELQKGNELALPSKYVNFLYLASHYEKLKGSPEDNEQKQLFVEQHKHYLDEIIEQISEFSKRVILADANLDKVLSAYNKHRDKPIREQAENIIHLFTLTNLGAPTAFKYFDTTIDRKRYTSTKEVLDATFIHQSITGLYETRIDLSQLGGD

SEQ ID NO: 556 - protein, 1368 aa, Streptococcus pyogenes
MDKKYSIGLDIGTNSVGWAVITDDYKVPSKKFKVLGNTDRHSIKKNLIGALLFDSGETAEATRLKRTARRRYTRRKNRICYLQEIFSNEIAKVDDSFFHRLEESFLVEEDKKHERHPIFGNIVDEVAYHEKYPTIYHLRKKLADSTDKADLRLIYLALAHMIKFRGHFLIEGDLNPDNSDVDKLFIQLVQTYNQLFEENPINASRVDAKAILSARLSKSRRLENLIAQLPGEKRNGLFGNLIALSLGLTPNFKSNFDLAEDAKLQLSKDTYDDDLDNLLAQIGDQYADLFLAAKNLSDAILLSDILRVNTEITKAPLSASMIKRYDEHHQDLTLLKALVRQQLPEKYKEIFFDQSKNGYAGYIDGGASQEEFYKFIKPILEKMDGTEELLAKLNREDLLRKQRTFDNGSIPHQIHLGELHAILRRQEDFYPFLKDNREKIEKILTFRIPYYVGPLARGNSRFAWMTRKSEETITPWNFEEVVDKGASAQSFIERMTNFDKNLPNEKVLPKHSLLYEYFTVYNELTKVKYVTEGMRKPAFLSGEQKKAIVDLLFKTNRKVTVKQLKEDYFKKIECFDSVEISGVEDRFNASLGTYHDLLKIIKDKDFLDNEENEDILEDIVLTLTLFEDREMIEERLKTYAHLFDDKVMKQLKRRRYTGWGRLSRKLINGIRDKQSGKTILDFLKSDGFANRNFMQLIHDDSLTFKEDLQKAQVSGQGDSLHEHIANLAGSPAIKKGILQTVKVVDELVKVMGRHKPENIVIEMARENQTTQKGQKNSRERMKRIEEGIKELGSDILKEYPVETTQLQNEKLYLYYLQNGRDMYVDQELDINRLSDYDVDHIVPQSFLKDDSIDNKVLTRSDKNRGKSDNVPSEEVVKKMKNYWKQLLNAKLITQRKFDNLTKAERGGLSELDKAGFIKRQLVETRQITKHVAQILDSRMNTKYDENDKLIREVRVITLKSKLVSDFRKDFQFYKVREINNYHHAHDAYLNAVVGTALIKKYPKLESEFVYGDYKVYDIRKMIAKSEQEIGKATAKYFFYSNIMNFFKTEITLANGEIRKRPLIETNGETGEIVWDKGRDFATVRKVLSMPQVNIVKKTEVQTGGFSKESILPKRNSDKLIARKKDWDPKKYGGFDSPTVAYSVLVVAKVEKGKSKKLKSVKELVGITIMERSSFEKDPVDFLEAKGYKEVRKDLIIKLPKYSLFELENGRKRMLASAGELQKGNELALPSKYVNFLYLASHYEKLKGSPEDNEQKQLFVEQHKHYLDEIIEQISEFSKRVILADANLDKVLSAYNKHRDKPIREQAENIIHLFTLTNLGAPAAFKCFDTTIGRNRYKSIKEVLDATLIHQSITGLYETRIDLSQLGGD

SEQ ID NO: 557 - protein, 1368 aa, Streptococcus pyogenes M1 GAS [sequence omitted]

SEQ ID NO: 558 - protein, 1368 aa, Streptococcus pyogenes; identical to SEQ ID NO: 552

SEQ ID NO: 559 - protein, 1370 aa, Streptococcus ratti FA-1 = DSM 20564
MKKPYSIGLDIGTNSVGWAVITDDYKVPAKKMKVLGNTDKNYIKKNLLGALLFDSGNTAEDRRLKRTARRRYTRRRNRLLYLQDIFSDEMNKVDESFFHRLEDSFLVSEDKRGDHHPIFGNVVDEVKYHEQFPTIYHLRKYLADTPEKADLRLVYLALAHMIKFRGHFLIDDPKLDVKNTDSQELFSQFLTAYDVTQEDSHLADVKINISDIITEKMNKSRKVEALLFHFPSQKKNSFFGNLVSLVFGLLPNFKTNFNLAEDAKLQLSKDSYDEDLENLLGQIGDEYTDVFVAARKLYDSILLSGILTVNDLSTKAILSASMVRRYEEHNKDLAKLKAFVKANFTHDVFKEVFSDASKNGYAGYIEGKTSQEDFYKYVKNLIGKVDGSADFIEKIDREDFLRKQRTFDNGSIPHQVHLAEMKAILRRQGEYYPFLKEHAEKIQQILTFRIPYYVGPLDRHGHSDFAWASFNSEEKVTPWNFEEIIDKNKSAQAFIERMTNQDLYLPNEKVLPKHSPLYEKYTVYNELTKIKYVTETGTAKFFDANLKQEIFDGLFKKERKVTKRKLLTFLEKNFDEFRIVDIQGLDKETETFNASYGIYQDLLKIIKDKAFMDDSENADILEDIVLTLTLFEDREMIKQRLAKYADLFDKKVIDNLARRRYTGWGRLSAKLLNGIRDKRSRKTIMDYLVDDGRSNRNLMQLITDDNLTFKDEIAKAQYSDNSDDLHQVVQDLAGSPAIKKGILQSVKIVDELVKVMGYEPEQIVVEMARENQTTAKGRRNSQQRYKRLEEAIKNLDRDLNYKILKEHPTDNQALQNDRLFLYYLQNGRDMYTGESLDINRLSDYDIDHIIPQAFIKDNSIDNRVLVSSAKNRGKSDDVPSEDVVNRMRPFWNKLLNCGLISQRKYSNLTKKELTPNDKAGFIKRQLVETRQITKHVARILDEHFNKEFDEDKKRIRKVKVVTLKSNLVSNFRKEFELYKVREINDYHHAHDAYLNAVVAKALLMKYPKLEPEFVYGEYPKYNSYRERKTATQRMFFYSNIMNMFKSKVKLADERIIERPMIEVNDETGEIAWDKTKHIATVKKVLSYPQINIVKKVEEQTGGLTNETIYPRGSFDKLLNRKNTLEASKYGGFGSPTVAYCVLVVADSKNENGKVKKLKLGSELLGITILEKNDFENNSLDFLSRKGYQGVQEKKIIKLPKYSLFEFQDGSRRMLSSVMANDNKRGDLQKANEMILPAYLVKLLYHAKHINSVGEPAHKNYINEHCSEFQDLLNYIRQFADKFVDVDKNLSKIRSLSKSMAEYSVSEICSSFVNLLTLTALGAPADFKFFGTTIPRKRYGSPQSILSATLIHQSITGLYETRIDLSKLGED

SEQ ID NO: 560 - protein, 1127 aa, Streptococcus salivarius
MSDLVLGLDIGIGSVGVGILNKVTGEIIHKNSRIFPAAQAENNVERRINRQGRRLTRRKKHRRVRLNHLFEESGLITDFTNVSINLNPYQLRVKGLTDELSNEELFIALKNMVKHRGISYLDDASDDGNSSVGDYAQIVKENSKQLETKTPGQIQLERYQKYGQLRGDFTVEEDGKKHRLINVFPTSAYRAEALRILQTQQEFNPQITDEFINSYLQILTGKRKYYHGPGNEKSRTDYGRYTTKKDSEDEYITLDNIFGILIGKCTFYPEEYRAAKASYTAQEFNLLNDLNNLTVPTETKKLSEEQKNQIITNVKNEKAMGPAKLFKYIAKLLSCDVADIKGYRIDKSDKAEIHTFEAYRKMKTLATIDIEQMERENLDKLAYVLTLNTEKEGIQEALEHEFADGTFSQEQIDELVQFRKANSSIFGKGWHSFSVKLMMELIPELYATSEEQMTILTRLGKQKTTSSSNKTKYIDEKQLTEEIYNPVAAKSVRQAIKIVNAAIKEYGDFDNIVIEMARETNEDDEKKAIQKIQKANKDEKDAAMLKAANQYNGKAELPHSVFHGHKQLATKIRLWHQQGERCLYTGKTISIHDLINNSNQFEIDHILPLSITFDDSLANKVLVYATANQEKGQRTPYQALDSMDDAWSFRELKAFVRDSKALSNKKKEYLLTEEDISKFDVRKKFIERNLVDTRYASRVVLNALQEHFRVHKTDTKVSVVRGQFTSQLRRHWGIEKTRDTYHHHAVDALIIAASSQLNLWKKQKNTLVSYSEDQLLDIETGELISDDEYKESVFKAPYQHFVDTLKSKEFEDSILFSYQVDSKFNRKISDATIYATRQAKVGKDKKDETYVLGKIKDIYSQTGYDAFIKIYKKDKSKFLMYRHDPQTFEKVIEPILENYPNKELNEKGKEVPCNPFLKYKEDHGYIRKYSKKGNGPEIKSLKYYDSKLGNHIDITPKNSNNKVVLQSVSPWRADVYFNKTTGKYEILGLKYADLKFEKGTGTYKISEEKYNDIKIKEGVDSDSEFKFTLYKNDLLLIKDTETKEQQLFRFLSRTMPNVKHYVELKPYDKQKFDDNEELIKILGIVAKGGQCKKGVSKPNISIYKIRTDVLGNQHIIKNEGDKPKLDF

SEQ ID NO: 561 - protein, 1385 aa, Streptococcus salivarius K12
MTKPYSIGLDIGTNSVGWAVITDDYKVPSKKMKVLGNTSKKYIKKNLLGALLFDSGITAEGRRLKRTARRRYTRRRNRILYLQEIFSTEMATLDDAFFQRLDDSFLVPDDKRDSKYPIFGNLVEEKVYHDEFPTIYHLRKHLADSSKKADLRLVYLALAHMIKYRGHFLIEGDFNSKNNDLQKNFQDFLDTYNAIFESDLSLENSKQLEEIVKDKISKSAKKDRILKLFPGEKNSGIFSEFLKLIVGNQADFRKYFNLDEKTSLQFSKESYDEDLETLLGHIGDDYSDVFLKAKKLYDAILLSGILTVTDNGTEAPLSSAMIMRYKEHEEDLALLKAYIRNISLETYNEVFKDNTKNGYAGYIDGKTSQEDFYVYLKRLLAGLEGADYFLEKIDREDFLRKQRTFDNGSIPYQIYLQEMRAILDKQAKFYPFLAKNKERIEKILTFRIPYYVGPLARGNSDFAWSIRKRNEKITPWNFEDVIDKESSAEAFINRMTSFDLYLPEEKVLPKHSLLYENFTVYNELTKVRFIAEGMRDYQFLDSKQKKDIVRLYFKGKRKVTDKDIIEYLHAIDGYDGIELKGIEKQFNSSLSTYHDLLNIINDKEFLDDSSNETIIEEIIHTLTMFEDREMIKQRLSKFDNIFDKSVLKKLSRRHYTGWGKLSAKLINGIRDEKSGNTILDYLIDDGVSNRNFMQLIHDDALSFKKKIKKAQIIGDKDNIKQVVKSLPGSPAIKKGILQSIKIVDELVKVMGREPESIVVEMARENQYTNQGKSNSQQRLKRLEESLKGLGSKILKENVPTRLSKIDNNALQNDRLYLYYLQNGKDMYTGEELDIDRLSNYDIDHIIPQAFLKDDSIDNKVLVSSASNRGKSDDVPSLEVVKKRKTLWYQLLKSKLISQRKFDNLTKAERGGLSQEEKAGFIQRQLVETRQITKHVARLLDERFNNKKDENNRTLRTVKIITLKSSLVSQFRKDFELYKVREINDFHHAHDAYLNAVVASALLKKYPKLEPEFVYGDYPKYNSFRERKSATEKVYFYSNIMNIFKKSIPLADGTVIDRPLIEVNEETGESVWNKVADLNTVRKVLSYSQVNIVKKVEEQNHGLDRGKPKGLFNANLSSKPKPNSKENLVGAKEYLDPKKYGGYAGISNSFAILVKGTIEKGAKKKITNVLEFQGISILDRIYYRKDKLNFLLEKGYKDIELIIELPKYSLFELSDGSRRMLASILSTNNKRGEIHKGNQIFISQKFVKLLYHAKRISSTFNENHRKYVENHKKEFEELFYYILEFNENYVGAKKNGELLKSAFQSWQNHSIDELCSSFIGPTGSERKGLFELTSRGGAADFEFLGVKIPRYRDYTPSSLLKDATLIHQSVTGLYETRIDLGKLGED

SEQ ID NO: 562 - protein, 1135 aa, Streptococcus salivarius PS4
MSDLVLGLDIGIGSVGVGILNKVTGEIIHKNSRIFPAAQAENNLERRTNRQGRRLTRRKKHRRVRLNHLFEESGLITDFTKVSINLNPYQLRVKGLTAELSNEELFIALKNMVKHRGISYLDDASDDGNSSVGDYAQIVKENSKQLETKTPGQIQLERYQKYGQLRGDFTVEEDGRKHRLINVFPTSAYHAEALRILQTQQEFNPQITDEFINSYLEILTGKRKYYHGPGNEKSRTDYGKYTTKKDAQGQYITLNNIFGILIGKCTFYPEEYRAAKASYTAQEFNLLNDLNNLTVPTETKKLSEEQKYQIITYVKNEKAMGPAKLFKYIAKLLACDIADIKGYRIDKSDKAEIHTFEAYRKMKTLETIDIEQIEREKLDKLAYVLTLNTEREGIQEALDHEFADGTFSQEQVDELVQFRKANSSIFGKGWHSFSVKLMMELIPELYATSEEQMTILTRLGKQKTTSSSNKTKYIDEKQLTEEIYNPVVAKSVRQAIKIVNAAIKKYGDFDNIVIEMARETNEDDEKKAIQKIQKANKAEKDAAMRKAANQYNGKAELPHSVFHGHKQLATKIRLWHQQGERCLYTGKTISIHDLINNPNQFEIDHILPLSITFDDSLANKVLVYATANQEKGQRTPYQALDSMDDAWSFRELKAFVRESKALSNKKKEYLLTEEDISKFDVRKKFIERNLVDTRYASRVVLNALQEHFKAHKIDTKVSVVRGQFTSQLRRHWGIDKTRDTYHHHAVDALIIAASSQLNLWKKQKNTLVSYSEDQLLDIETGELISDDEYKESVFKAPYQHFVDTLKSKEFEDSILFSYQVDSKFNRKISDATIYATRQAKVGKDKKDETYVLGKIKDIYALGTKTPSKTGFYKFLDLYNKDKSQFLVYQKDRKTWDEVIEKIMEQYRPFKESDKNGKEVDFNPFEKYRIENGPIRKYSRKGNGPEIKSLKYYASKLGNHIDITPKDSNNKVVLQSVSPWRADVYFNKTTGSYEILGLKYADLQFEKGTGTYRISEEKYNDIKKKEGVDSDSEFKFTLYKNDLLLIKDTETKEQRLFRFLSRSMPNKKHYVELKPYSKDKFEKNESLIEILGSADKSGRCIKGLAKSNLSIFKVRTDVLGNQHIIKNEGDKPKLDF

SEQ ID NO: 563 - protein, 1377 aa, Streptococcus sanguinis SK115
MKKPYSIGLDIGTNSVGWAVITDDYKVPSKKMKVLGNTDKHFIKKNLIGALLFDEGTTAEDRRLKRTSRRRYTRRKNRLRYLQEIFSEEISKLDSSFFHRLDDSFLVPEDKRGSKYPIFATLEEEKEYHKKFPTIYHLRKHLADSKEKTDLRLIYLALAHMIKYRGHFLYEESFDIKNNDIQKIFNEFISIYDNTFEGSSLSGQNAQVEAIFTDKISKSTKRERVLKLFSDEKSTGLFSEFLKLIVGNQADFKKHFDLEEKAPLQFSKDTYDEDLENLLGQIGDGFADLFLVAKKLYDAILLSGILTVTDPSTKAPLSASMIERYENHQEDLAALKQFIKNNLSEKYAEVFSDQSKDGYAGFIDGKTTQEAFYKYIKNLLSKLEGADYFLNKIEREDFLRKQRTFDNGSIPHQIHLQEMNAILRRQGEHYLFLKENREKIEKILAFRIPYYVGPLARGNRDFAWLTRNSDQAIRPWNFEEVVDKASSAEDFINKMTNYDLYLPEEKVLPKHSLLYETFAVYNELTKVKFIAEGLRDYQFLDSGQKKQIVNQLFKDKRKVTEKDIIHYLHNVDGYDGIELKGIEKQFNASLSTYHDLLKIIKDKEFMDNPKNGEILENIIHTLTIFEDREMIKQRLAQYDTLFDEKVIKALTRRHYTGWGKLSAKLINGIRDKQTGKTILEYLIDDGDCNRNFMQLINDDGLSFKEIIQKAQVVGKTDDVKQVVQEIPGSPAIKKGILQSIKIVDELVKVMGHNPESIVIEMARENQTTAKGKKNSQQRYKRIEDALKNLAPGLDSNILKENPTDNIQLQNDRLFLYYLQNGKDMYTGKAIDINQLSNYDIDHIIPQAFIKDDSLDNRVLTSSKDNRGKSDNVPSIEVVQKRKAFWQQLLDSKLISERKFNNLTKAKRGGLDERDKVGFIKRQLVETRQITKHVAQLLDTRFNTEVNEENQKIRTVKIITLKSNLVSNFRKEFGLYKVREINDYHHAHDAYLNAVVAKAILKKYPKLEPEFVYGDYQKYDLKRYILKSKASNTIDKATEKYFFYSNLLNFFKEKVRYADGTIKKRENIEYSNDTGEIAWNKEKDFATIKKVLSLPQVNIVKKTEEQTVGQNGGLFDNNIVSKKKVVDASKLIPIKSSLSPEKYGGYARPTIAYSVLVIADIEKGKGKAKKLKRIKEIVGITIQDKKKFESNPVTYLEECGYKNINSNLIIKLPKYSLFEFNDGQRRLLASSIELQKGNELILPYHLTALLYHAQRINKISEPIHKQYVEAHQNEFKELLTTIISLSKKYIQKPNVELLLQQAFDQADKDIYQLSESFISLLKLTSFGAPGAFKFLGVEISQSSVRYKPNSQFLDTTLIHQSITGLYETRIDLSKLGED

SEQ ID NO: 564 - protein, 1392 aa, Streptococcus sanguinis SK330
MENKNYSIGLDIGTNSVGWAVITDDYKVPSKKMKVFGNTDKHFIKKNLIGALLFDEGATAEDRRLKRTARRRYTRRKNRLRYLQEIFSEEISKLDSSFFHRLDDSFLVPKDKRGSKYPIFATLEEEKEYHKKFPTIYHLRKHLADSKEKTDLRLIYLALAHMIKYRGHFLYEESFDIKNNDIQKIFNEFISIYDNTFEGSSLSGQNAQVEAIFTDKISKSAKRERVLKLFSDEKSTSLFSEFLKLIVGNQADFKKHFDLEEKAPLQFSKDTYDEDLENLLGQIGDGFTDLFLVAKKLYDAILLSGILTVTDPSTKAPLSASMIERYESHQKDLAALKQFIKNNLPKRYNEVFSDQSKDGYAGYIDGKTTQEAFYKYIKNLLSKFEGADYFLDKIEREDFLRKQRTFDNGSIPHQIHLQEMNAILRRQGEHYPFLKENREKIEKILTFRIPYYVGPLARGNRDFAWLTRNSDQAIRPWNFEEIVDKASSAEEFINKMTNYDLYLPEEKVLPKHSLLYETFAVYNELTKVKFIAEGLRDYQFLDSGQKKQIVNQLFKEKRKVTEKDIIHYLHNVDGYDGIELKGIEKQFNASLSTYHDLLKIIKDKEFMDDPKNEEILENIVHTLTIFEDREMIKQRLAQYDSIFDEKVIKALTRRHYTGWGKLSAKLINGICDKQTGDTILDYLIDDGKINRNFMQLINDDGLSFKEIIQKAQVVGKTDDVKQVVQELPGSPAIKKGILQSIKIVDELVKVMGYAPESIVIEMARENQTTARGKKNSQQRYKRIEDSLKNLAPGLDSNILKENPTDNIQLQNDRLFLYYLQNGKDMYTGKPLDIDQLSSYDIDHIIPQAFIKDDSIDNRVLTSSKDNRGKSDNVPSLEVVQKRKAFWQQLLDSKLISERKFNNLTKAERGGLDERDKVGFIRRQLVETRQITKHVAQILDASFNTEVNEKNQKIRTVKIITLKSNLVSNFRKEFELYKVREINDYHHAHDAYLNAVVAKAILKKYPKLEPEFVYGDYQKYDLKRYISRFKPSKEIEKATEKYFFYSNLLNFFKEEVHYADGIIVKRENIEYSKDTGEIAWNKEKDFATIKKVLSYPQVNIVKKTEIQTHGLDRGKPKGLFNSNPSPKPSEDSKENLVPIKQGLDPRKYGGYAGISNSYAVLVKAIVEKGAKKQQKTILEFQGISILDKINFENNKENYLLKKRYIEILSTITLPKYSLFEFPDGTRRRLASILSTNNKRGEIHKGNELVLPGKYTTLLYHAKNINKKLEPEHLEYVEKHRNDFAKLLECVLNFNDKYVGALKNGERIRQAFTDWETVDIEKLCFSFIGPENSKNAGLFELTSQGSASDFEFLGVKIPRYRDYAPSSLLKATLIHQSITGLYETRIDLSKLGED

SEQ ID NO: 565 - protein, 1370 aa, Streptococcus sanguinis SK353
MKKPYSIGLDIGTNSVGWAVVTDDYKVPAKKMRVFGDTDRSHIKKNLLGTLLFDDGNTAESRRLKRTARRRYTRRRNRILYLQEIFTESMNEIDESFFHRLDDSFLVPEDKRGSKYPIFATLQEEKEYHKQFPTIYHLRKQLADSKEKSDVRLIYLALAHMIKYRGHFLYEETFDIKNNDIQKIFNEFINIYDNTFEGSSLSGQNAQVEAIFTDKISKSAKRERVLKLFPDEKSTGLFSEFLKLIVGNQADFKKHFDLEEKAPLQFSKDTYDEELENLLGQIGDDFADLFLIAKKLYDAILLSGILTVTDPSTKAPLSASMIERYENHQKDLAALKQFIKNNLPEKYVEVFSDQSKDGYAGYIDGKTTQEAFYKYIKNLLSKFEGADYFLDKIEREDFLRKQRTFDNGSIPHQIHLQEMNAILRRQGEHYPFLKENREKIEKILTFRIPYYVGPLARDNRDFSWLTRNSDEPIRPWNFEEVVDKARSAEDFIHRMTNYDLYLPEEKVLPKHSLLYETFAVYNELTKVKFIAEGLRDYQFLDSGQKKQIVNQLFKEKRKVTEKDIIHYLHNVDGYDGIELKGIEKQFNANLSTYHDLLKITKDKEFMDDPKNEEILENIVHTLTIFEDREMIKQRLAQYDTLFDEKVIKALTRRHYTGWGKLSAKLINGIRDKQSGKTILDYLIDDDKINRNFMQLINDDGLSFKEIIQKAQVVGKTDDVKQVVQELPGSPAIKKGILQSIKIVDELVKVMGYALESIVIEMARENQTTARGKKNSQQRYKRIEDALKNLAPGLDSNILKENPTDNIQLKNDRLFLYYLQNGKDMYTGKPLDINQLSSYDIDHIIPQAFIKDDSIDNRVLTSSKDNRGKSDNVPSLEVVQKRKAFWQQLLDSKLISERKFNNLTKAERGGLDERDKVGFIRRQLVETQQITKNVAQILDARFNTEVKEKNQKIRTVKIITLKSNLVSNFRKEFGLYKVREINNYHHAHDAYLNAVVAKAILKKYPKLEPEFVYGDYQKYDLKKYISRFKPSKEIEKATEKYFFYSNLLNFFKEEVLYADGTIRKRENIEYSKDTGEIAWDKEKDFATIKKVLSYPQVNIVKKREVQTGGFSKESILPKGNSDKLIPRKTKDILWDTTKYGGFDSPVIAYSILLIADIEKGKAKKLKTVKTLVGITIMEKAAFEENPITFLENKGYHNVRKENILCLPKYSLFELENGRRRLLASAKELQKGNEIVLPVCLTTLLYHSKNLHKLDEPEHLEYIQKHRNEFKDLLNLVSEFSQKYILAEANLEKIKDLYADNEQADIEILANSFINLLTFTALGAPAAFKFFGKDVDRKRYTTVSEILNATLIHQSITGLYETRIDLSKLGEE

SEQ ID NO: 566 - protein, 1421 aa, Streptococcus sanguinis SK49
MTKFNKNYSIGLDIGVSSVGYAVVTEDYRVPAFKFKVLGNTEKEKIKKNLIGSTTFVSAQPAKGTRVFRVNRRRIDRRNHRITYLRDIFQKEIEKVDKNFYRRLDESFRVLGDKSEDLQIKQPFFGDKELETAYHKKYPTIYHLRKHLADADKNSPVADIREVYMAISHILKYRGHFLTLDKINPNNINMQNSWIDFIESCQEVFDLEISDESKNIADIFKSSENRQEKVKKILPYFQQELLKKDKSIFKQLLQLLFGLKTKFKDCFELEEEPDLNFSKENYDENLENFLGSLEEDFSDVFAKLKVLRDTILLSGMLTYTGATHARFSATMVERYEEHRKDLQRFKFFIKQNLSEQDYLDIFGRKTQNGFDVDKETKGYVGYITNKMVLTNPQKQKTIQQNFYDYISGKITGIEGAEYFLNKISDGTFLRKLRTSDNGAIPNQIHAYELEKIIERQGKDYPFLLENKDKLLSILTFKIPYYVGPLAKGSNSRFAWIKRATSSDILDDNDEDTRNGKIRPWNYQKLINMDETRDAFITNLIGNDIILLNEKVLPKRSLIYEEVMLQNELTRVKYKDKYGKAHFFDSELRQNIINGLFKNNSKRVNAKSLIKYLSDNHKDLNAIEIVSGVEKGKSFNSTLKTYNDLKTIFSEELLDSEIYQKELEEIIKVITVFDDKKSIKNYLTKFFGHLEILDEEKINQLSKLRYSGWGRYSAKLLLDIRDEDTGFNLLQFLRNDEENRNLTKLISDNTLSFEPKIKDIQSKSTIEDDIFDEIKKLAGSPAIKRGILNSIKIVDELVQIIGYPPHNIVIEMARENMTTEEGQKKAKTRKTKLESALKNIENSLLENGKVPHSDEQLQSEKLYLYYLQNGKDMYTLDKTGSPAPLYLDQLDQYEVDHIIPYSFLPIDSIDNKVLTHRENNQQKLNNIPDKETVANMKPFWEKLYNAKLISQTKYQRLTTSERTPDGVLTESMKAGFIERQLVETRQIIKHVARILDNRFSDTKIITLKSQLITNFRNTFHIAKIRELNDYHHAHDAYLAVVVGQTLLKVYPKLAPELIYGHHAHFNRHEENKATLRKHLYSNIMRFFNNPDSKVSKDIWDCNRDLPIIKDVIYNSQINFVKRTMIKKGAFYNQNPVGKFNKQLAANNRYPLKTKALCLDTSIYGGYGPMNSALSIIIIAERFNEKKGKIETVKEFHDIFIIDYEKFNNNPFQFLNDTSENGFLKKNNINRVLGFYRIPKYSLMQKIDGTRMLFESKSNLHKATQFKLTKTQNELFFHMKRLLTKSNLMDLKSKSAIKESQNFILKHKEEFDNISNQLSAFSQKMLGNTTSLKNLIKGYNERKIKEIDIRDETIKYFYDNFIKMFSFVKSGAPKDINDFFDNKCTVARMRPKPDKKLLNATLIHQSITGLYETRIDLSKLGED

SEQ ID NO: 567 - protein, 1026 aa, Streptococcus sp. BS35b
MNGLVLGLDIGIASVGVGILEKNSGKIIHANSRLFPAATADNNVERRKNRQARRLNRRKKHRGVRFQDLFEDYGLLTDFSKVSINLNPYRLRVDGLNQQLTNEELFIALKNIVKRRGISYLDDASEDGGAVSSDYGKAVEENRKLLAEQTPGQIQLERFEKYGQVRGDFTVVENGEKRRLINVFSTSAYRKEAEKILRKQQEFNNQITDEFIEDYLKILTGKRKYYHGPGNEKSRTDYGRFRTDGTTLDNIFGVLIGKCTFYPNEYRASKSSYTAQEFNLLNDLNNLTVPTETKKLSEEQKKVIVEYAKEAKTLGASTLLKYIVKMIDASVDQISGYRVDVNNKPEMHTFEVYRKMQSLETISVGELSRNVLDELAHILTLNTEREGIEEAINSKLMGVFSQDQVLELVQFRKNNSSLFSKGWHNFSLKLMMELIPELYETSEEQMTILTRLGKQKSKETSKRTKYIDEKELTEEIYNPVVAKSVRQAIKIINEATKKHGIFDNIVIEMARENNEEDAKKDYIKRQKANQDEKNAAMEKAAFQYNGKKELPGNIFNGHKELATKIRLWHQQGEKCLYTGKTIPISDLIHNQYKYEIDHILPLSLSFDDSLSNKVLVHATANQEKGQRTPFQALDSMDDAWSYREFKSYVKDLKSLSNKKKDYLLTEEDISKIEVKQKFIERNLVDTRYSSRVVLNALQDFYKSHQFDTTISVVRGQFTSQLRRKWGLEKSRETYHHHAVDALIIAASSQLRLWKKQNNPLITYKEGQFIDSQTGEIISLTDDEYKELVFKAPYDHFVDTLHSKTFEDGILFSYQVDSKYNRKISDATIYATRKAKLDKDKSEETYVLGKIKDIYSQAGYDAFIKIYNKDKRKFLMYHKDPQTFEKVIEEILRTYPSKERNDKNKEVPCNPFEKYRQENGPIRKYSKKGNGPEIKCLKYYDNKLGNYIDISPDGSDNQVVLQSLKPWRTDVYFNHQTKKYELMGLKYSDLSFEKGSGKYSISNEKYNSIKRIEGVNEQSEFKFTLYK

SEQ ID NO: 568 - protein, 1139 aa, Streptococcus sp. C150
MSDLVLGLDIGIGSVGVGILNKVTGEIIHKNSRIFPAAQAENNLERRTNRQGRRLTRRKKHRRVRLNHLFEESGLITDFTKVSINLNPYQLRVKGLTAELSNEELFIALKNMVKHRGISYLDDASDDGNSSVGDYAQIVKENSKQLETKTPGQIQLERYQKYGQLRGDFTVEEDGRKHRLINVFPTSAYHAEALRILQTQQEFNPQITDEFINSYLEILTGKRKYYHGPGNEKSRTDYGKYTTKKDAQGQYITLNNIFGILIGKCTFYPEEYRAAKASYTAQEFNLLNDLNNLTVPTETKKLSEEQKYQIITYVKNEKAMGPAKLFKYIAKLLSCDVADIKGYRIDKSDKAEIHTFEAYRKMKTLETLDVKKMAREELDKLAYVLTLNTEREGIQEALDHEFADGTFSQEQVDELVQFRKANSSIFGKGWHSFSVKLMMELIPELYATSEEQMTILTRLGKQKTTSSSNKTKYIDEKQLTEEIYNPVVAKSVRQAIKIVNAAIKKYGDFDNIVIEMARETNEDDEKKAIQKIQKANKAEKDAAMRKAANQYNGKAELPHSVFHGHKQLATKIRLWHQQGERCLYTGKTISIHDLINNPNQFEIDHILPLSITFDDSLANKVLVYATANQEKGQRTPYQALDSMDDAWSFRELKAFVRESKALSNKKKEYLLTEEDISKFDVRKKFIERNLVDTRYASRVVLNALQEHFRTHKIDTKVSVVRGQFTSQLRRHWGIEKTRDTYHHHAVDALIIAASSQLNLWKKQKNTLVSYSEDQLLDIETGELISDDEYKESVFKAPYQHFVDTLKSKEFEDSILFSYQVDSKFNRKISDATIYATRKAKLDKEKKEYTYTLGKIKDIYALGTKTPSKTGFYKFLDLYKKDKSQFLMYQKDRRTWDEVIEKILEQYRPFKEKDKNGKEVDFNPFEKYRIENGPIRKYSRKGNGPEIKSLKYYDNLLGRFVDITPSESKNPVALLSLNPWRTDVYYNTETRKYEFLGLKYADLCFEKGGSYGISKVKYNKIREKEGIGKNSEFKFTLYKNDLILIKDTETNRQQIFRFWSRTGKDNPKSFEKHKLELKPYEKTRFEKGEELKVLGKVPPSSNRLQKNMQIENLSIYKVRTDVLGNQHIIKNEGDKPKLDF

SEQ ID NO: 569 - protein, 1377 aa, Streptococcus sp. C300
MNNKPYSIGLDIGTNSVGWSVITDDYKVPSKKMKVLGNTDKRFIKKNLIGALLFDEGTTAEARRLKRTARRRYTRRKNRLRYLQEIFAEEMSKVDSSFFHRLDDSFLIPEDKRGSKYPIFATLVEEKEYHKQFPTIYHLRKQLADSKEKADLRLIYLVLAHMIKYRGHFLYEEAFDIKNNDIQKIFNEFISIYDNTFEGSSLSGQNAQVETIFTDKISKSAKRERVLKLFPDEKSTGLFSEFLKLIVGNQADFKKHFDLEEKAPLQFSKDTYDEDLENLLEQIGDDFADLFVAAKKLYDAILLSGILTVTDPSTKAPLSASMIERYENHQKDLAVLKQFIKTNLPEKYVEVFSDQSKDGYAGYIDGKTTQEAFYKYIKNLLSKFDGADYFLDKIEREVFLRKQRTFDNGSIPHQIHLQEMNTILRRQGEHYPFLKENKEKIEKILTFRIPYHVGPLARGNRDFAWLTRNSDQAIRPWNFEEIVDKASSAEDFINKMTNYDLYLPEEKVLPKHSLLYETFAVYNELTKVKFIAEGMRDYQFLDSGQKKKIINQLFKKKRKVTEDDIIDCLQKIDNYDGIELKGIEKQFNASLSTYHDILKIIRDKEFMDDPKNGDILENVIHTLTIFEDREMIKQRLAQYNSIFDEKVIKALSRKHYTGWGKLSAKLIDGIRDKQTGKTILDYLMDDGKSNRNFMQLIKDDELSFTEIIQKAQVVGDTDNLRQVVQNLPGSPAIKKGILQSIKIVDELVKVMGHAPESIVIEMARENQTTARGKKNSQQRYKRIEDSLKNLASGLDSNILKENPTDNIQLQNDRLFLYYLQNGKDMYTGEALNINQLSSYDIDHIIPQAFIKDDSLDNRVLTSSKDNRGKSDNVPSLEVVEKMKAFWQQLLDSKLISERKYNNLTKAERERGGLNELDKVGFIKRQLVETRQITKHVAQILDARFNKEVTEKNKKNRNVKIITLKSNMVSNFRKEFGLYKVREINDYHHAHDAYLNAVVAKAILKKYPKLEPEFVYGDYQKYDLKRYISRSKDPKEVEKATEKYFFYSNLLNFFKEEVHYADGTIVKRENIEYSKDTGEIAWNKEKDFATIKKVLSLPQVNIVKKTEEQTVGQNGGLFDNNIVSKKKVVDASKLIPIKSGLSPEKYGGYARPTIAYSVLVTYKQNNKIKNTMVGIPVLTKLEFERDPNLYLRNLGINNVSHVIKLVKYTVLEFKHKYGTYRRFIVSNQELKRANQIFVTTKQMKLISQYTTLDKNEHDSLLKNNQQLIQSIWNQFLEFMLATDLVNKKQYDELILTNNQTIEECRNIMNRVITTLSFTNINAGQKKIIFDDTLSLPIKRWQFTDSDKMVKKIIESTLIHQSITGLYETRIDLSKLGED

SEQ ID NO: 570 - protein, 1371 aa, Streptococcus sp. F0441
MENKNYSIGLDIGTNSVGWSVITDDYKVPSKKMKVLGNTDKHFIKKNLIGALLFDEGTTAEARRLKRTARRRYTRRKNRLRYLQEIFSEEIGKVDSSFFHRLDDSFLIPEDKRGSKYPIFATLAEEKKYHKQFPTIYHLRKQLADSKEKTDLRLIYLALAHMIKYRGHFLYEEAFDIKNNDIQKIFNEFISIYNNTFEGNSLSGQNVQVEAIFTDKISKSAKRERVLKLFPDEKSTGLFSEFLKLIVGNQADFKKHFDLEEKAPLQFSRDTYDEDLENLLGQIGDDFADLFLVAKKLYDAILLSGILTVTNPSTKAPLSASMIERYENHQKDLASLKQFIKNNLPEKYDEVFSDQSEDGYAGYIDGKTTQETFYKYIKNLLSKFEGADYFLDKIEREDFLRKQRTFDNGSIPHQIHLQEMNAILRRQGEHYPFLKENKEKIEKILTFRIPYYVGPLARGNRDFAWLTRNSDQAIRPWNFEEIVDKASSAEDFINKMTNYDLYLPEEKVLPKHSLLYETFAVYNELTKVKFIAEGLRDYQFLDSGQKKQIVTQLFKEKRKVTEKDIIQFLHNVDGYDGIELKGIEKQFNASLSTYHDLLKIIKDKAFMDDAKNEAILENIVHTLTIFEDREMIKQRLAQYDSLFDEKVIKALTRRHYTGWGKLSAKLINGISDKQTGNTILDYLIDDGEINRNFMQLINDDGLSFKEIIQKAQVVGKTNDVKQVVQELPGSPAIKKGILQSIKIVDELVKVMGHAPESIVIEMARENQTTARGKKNSQQRYKRIEDSLKILASGLNSKILKEHPTDNIQLQNDRLFLYYLQNGKDMYTGEALDINQLSSCDIDHIIPQAFIKDDSLDNRVLTSSKDNRGKSDNVPSLEVVDKMKVFWQQLLDSKLISYRKFNNLTKAERGGLNELDKVGFIKRQLVETRQITKHVAQILDARFNKEVTEKDKKNRTVKIITLKSNLVSNFRKEFELYKVREINDYHHAHDAYLNAVVAKAILKKYPKLEPEFVYGDYQKYDLKRYISRSKDPKEIEKATEKYFFYSNLLNFFKEEVHYADGTIVKRENIEYSKDTGEIAWNKEKDFATIKKVLSLPQVNIVKKREVQTGGFSKESILPKGNSDKLIPRKTKDILWDTTKYGGFDSPVIAYSILLIADIEKGKAKKLKTVKTLVGITIMEKDAFEKNPIAFLENKGYHNVCKENILCLPKYSLFELENGRRRLLASAKELQKCNEIVLPVYLTTLLYHSKNVHKLDEPGHLEYIQKHRNEFKDLLNLVSEFSQKYVLADANLEKIKNLYADNEQADIEILANSFINLLTFTALGAPAAFKFFGKDVDRKRYTTVSEILNATLIHQSITGLYETRIDLSKLGED

SEQ ID NO: 571 - protein, 1121 aa, Streptococcus sp. GMD6S
MNGLVLGLDIGIASVGVGILEKNSGKIIHANSRLFPAATADNNVERRKNRQARRLHRRKKHRGVRFQDLFEDYGLLTDFSKVSINLNPYRLRVDGLNQQLTNEELFIALKNIVKRRGISYLDDASEDGGTVSSDYGKAVEENRKLLAEQTPGQIQLERFEKYGQVRGDFTVVENGEKRRLINVFSTSAYRKEAERILRKQQEFNSKITDEFIEDCLKILTGKRKYYHGPGNEKSRTDYGRFRTDGTTLDNIFGILIGKCTFYPDEYRASKASYTAQEFNLLNDLNNLTVPTETKKLSEEQKKVIVEYAKEAKTLGASTLLKYIAKMIDASVDQIRGYRVDVNNKPEIHTFEAYRKMQSLETISVGELSRNVLDELAHILTLNTEREGIEEAINTKLKDSFSQDQVLELVQFRKNNSSLFSKGWHNFSLKLMMELIPELYETSEEQMTILTRLGKQKSKEISKRTKYIDEKELTEEIYNPVVAKSVRQAIKIINEATKKHGIFDNIVIEMARENNEEDAKKDYIKRQKANQDEKNAAMEKAAFQYNGKKELPDSIFHGQKELATKIRLWHQQGEKCLYTGKNIPISDLIHNQYKYEIDHILPLSLSFDDSLSNKVLVLATANQEKGQRTPFQALDSMDDAWSYREFKSYVKESKLLGNKKKEYLLTEEDISKIEVKQKFIERNLIDTRYSSRVVLNALQDFYKAHKFDTTISVVRGQFTSQLRRKWGLEKSRETYHHHAVDALIIAASSQLRLWKKQNNPLIAYKEGQFVDSETGEIISLSDDEYKELVFKAPYDHFVDTLSSKTFEDSILFSYQVDSKFNRKISDATIYATRKAKLDKEKSEETYVLGKIKDIYSQAGYDAFIKIYNKDKSKFLMYHKDPQTFEKVIEEILRTYPSKELNDKNKEIPCNPFEKYRQENGPIRKYSKKSNGPEIKSLKYYDNKLGNHIDITPESSDNQVVLQSLKPWRTDVYFNHQTKKYELMGLKYSDLSFEKGSGKYSISNQKYNSIKRIEGIDEQSEFKFTLYKNDLILIKDSENNEQKLFRFNSRNDTAKHYIELKPYDKAKFDGEQELITILGNVAKGGRCLKGLNKSNISIFKVKTDVLGKKHIIKKEGDEPKLKF

SEQ ID NO: 572 - protein, 1375 aa, Streptococcus sp. M334
MSNKSYSIGLDIGTNSVGWAVITDDYKVPSKKMKVLGNTDKHFIKKNLIGALLFDEGTTAEDRRLKRTARRRYTRRKNRLRYLQEIFSQEISKVDSSFFHRLDDFFLVPEDKRGSKYPIFATLVEEKEYHKKFPTIYHLRKHLADSKEKTDLRLIYLALAHMIKYRGHFLYEESFDIKNNDIQKIFSEFISIYDNTFEGKSLSGQNAQVEAIFTDKISKSTKRERVLKLFPDEKSTGLFSEFLKLIVGNQADFKKHFDLEEKAPLQFSKDTYDEDLENLLGQIGDDFADLFLVAKKLYDAILLSGILTVKDLSTKAPLSASMIERYENHQKDLAALKQFIQNNLQEKYDEVFSDQSKDGYAGYIDGKTTQEAFYKYIKNLLSKFEGADYFLDKIEREDFLKKQRTFDNGSIPHQIHLQEMNAIIRRQGEHYPFLQENKEKIEKILTFRIPYYVGPLARGNGDFAWLTRNSDQAIRPWNFEEIVDQASSAEDFINKMTNYDLYLPEEKVLPKHSLLYETFAVYNELTKVKFIAEGLTRYQFLDKKQKKDIFDTFFKAENKRKVTEKDIIHYLHNVDGYDGIELKGIEKQFNASLSTYHDLLKIIKDKAFMDDSKNEEILENIIHTLTIFEDREMIKQRLAQYDSLFDEKVIKALTRRHYTGWGKLSAKLINGIRDKKSGKTILDYLIDDGEINRNFMQLIHDDGLSFKEIIQKAQVFGKTNDVKQVVQELPGSPAIKKGILQSIKIVDELVKVMGHAPESIVIEMARENQTTARGKKNSQQRYKRIEDSLKNLASGLDSNILKENPTDNIQLQNDRLFLYYLQNGRDMYTGKPLEINQLSNYDIDHIIPQAFIKDDSLDNRVLTSSKDNRGKSDNVPSLEVVEKMKAFWQQLLDSKLISERKFNNLTKAERERGGLNELDKVGFIKRQLVETRQITKHVAQFLDARFNKEVTEKDKKNRNVKIITLKSNLVSNFRKEFGLYKVREINDYHHAHDAYLNAVLAKAILKKYPKLEPEFVYGDYQKYDLQRYISKSREPKEVEKATQKYFFYSNLLNFFKEEVHYADGTIVKRENIEYSKDTGEIAWNKEKDFATVKKVLSLPQVNIVKKTEVQTGGFSKESILPKGNSDKLIPRKTKEILWDTTKYGGFDSPVIAYSILLIADIEKGKAKKLKTVKTLVGITIMEKATFEKNPITFLENKGYHNVRKENILCLPKYSLFELESGRRRMLASAKELQKGNEIVLPVYLTTLLYHSKNVHKLDEPEHLEYIQKHRYEFKDLLNLVSEFSQKYVLADANLEKIKNLYADNEQADIEILANSFINLLTFTALGAPAAFKFLGKDVDRKRYTTVSEILNATLIHQSITGLYETRIDLSKLGED

SEQ ID NO: 573 - protein, 1371 aa, Streptococcus sp. oral taxon 056 str. F0418
MNNNNYSIGLDIGTNSVGWAVITDDYKVPSKKMRVLGNTDKRFIKKNLIGALLFDEGTTAEDRRLKRTARRRYTRRKNRLRYLQEIFAEEMSKVDSSFFHRLDDSFLVPEDKSGSKYPIFATLAEEKEYHKKFPTIYHLRKHLADSKEKADLRLIYLALAHITKYRGHFLYEEAFDIKNNDIQKIFNEFINIYDNTFEGSSLSGQNAQVEAIFTGKISKSVKREHVLKLFPDEKSTGLFSEFLKLIVGNQADFKKHFDLEEKASLQFSKDTYDEDLENLLGQIGDDFADLFLVAKKLYDAILLSGILTVTDPSTKAPLSASMIERYENHQEDLAALKQFIKNNLPEKYAEVFSDQSKDGYAGYIDGKTTQEAFYKYIKNLLSKFEGADYFLDKIEREDFLRKQRTFDNGSIPHQIHLQEMNAILRRQGEHYPLLKENKEKIEKILTFRIPYYVGPLARGNRDFAWLTRNSDQAIRPWNFEEIVDKASSAESFINKMTNYDLYLPEEKVLPKHSLLYETFAVYNELTKVKFIAEGLRDYQFFDSGQKKQIVNQLFKEKRKVTEKDIIHYLHNVDGYDGIELKGIEKQFNASLSTYHDLLKIIKDKEFMDNHKNQEILENIVHTLTIFEDREMIKQRLAQYDSIFDEKVIKALTRRHYTGWGKLSAKLINGICDKKTGKTILDYLIDDGYNNRNFMQLINDDGLSFKEIIQKAQVVGKTDDLTQVVRELSGSPAIKKGILQSIKIVDELVKIMGYAPESIVIEMARENQTTAKGKKNSQQRYKRIEDALKNLAPGLDSTISKENPTDNIQLQNDRLFLYYLQNGKDMYTGEALDINQLSSYDIDHIIPQAFIKDDSLDNRVLTSSKDNRGKSDNVPSLEVVKKRKAFWQQLLDSKLISERKFNNLTKAERGGLDERDKVGFIKRQLVETRQITKHVARILDARFNTEVSEKNQKIRSVKIITLKSNLVSNFRKEFKLYKVREINDYHHAHDAYLNAVVAKAILKKYPKLEPEFVYGDYQKYDLKRYISKSKDPKEVEKATEKYFFYSNLLNFFKEEVHYADGTIVKRENIEYSKDTGEIAWNKEKDFVTIKKVLSYPQVNIVKKREVQTGGFSKESILPKGNSDKLIPRKTKDILWDTTKYGGFDSPVIAYSILLIADIEKGKAKKLKTVKTLVGITIMEKAAFEKNPITFLENKGYHNVRKENILCLPKYSLFELENGRRRLLASAKELQKGNEIVLPVYLTTLLYHSKNVHKLDEPEHLEYIQKHRYEFKDLLNLVSEFSQKYVLAEANLEKIKSLYVDNEQADIEILANSFINLLTFTALGAPAAFKFFGKDVDRKRYTTVSEILNATLIHQSITGLYETRIDLSKLGED

SEQ ID NO: 574 - protein, 1420 aa, Streptococcus sp. oral taxon 071 str. 73H25AP
MAKFNKNYSIGLDIGVSSVGYAVVTEDYRVPAFKFKVLGNTEKEKIKKNLIGSTTFVPAQSAQGTRVFRVNRRRIDRRNHRIAYLRDIFQKEIEKIDKNFYRRLDESFRVLGDKSEDIQIKQPFFGNKELETAYHKKYPTIYHLRKHLADADKNSPVADIREVYMVLSHILKYRGHFLTLGKIDPNNINMQNSWIDFIESCQDAFDLEISDESKTIAAIFKSSENRQEKVKQILSYFQQELLKKDKSIFKQLLQLLFGLKTKFKDCFELEEEPDLNFSKENYDENLENLLGALEEDFSDVFAKLKILRDTILLSSMLTYTGATHARFSATMVERYEEHRKDLQRFKSFVKQNLSEQDYLDIFGRKTPTGFDVDKETKGYVGYISNKMVLTNPQKQKTIQQNFYDYISGKITGIEGAECFLNKISDGTFLRKLRTTDNGAIPNQIHAYELEKIIERQGRDYPFLLENKDKLLSILTFKIPYYVGPLAKGNNSRFAWIKRTTSQDVLDDNDEDTRNGKIRPWNYHKLINMDETRDAFIINLIGNDIILLNEKVLPKRSLIYEEVMLQNELTRVKYKDKYGKIHFFNSELRQEIINNLFKTNSKRVSSAMLLSYLENFTNLQAVEIVSGIEKGKSLNSTLKTYNDLKTIFSEELLDSEIYQKELEEIIKVITVFDDKKSIKNYLTKYFGHLEFLNEEKINQLSKLRYTGWGRYSGKLLLGIRDEDTGFNLMQFLRNDDENRNLTQLISDTTLSFDSAIKAIQSKSTVEDDVFEEIKNLAGSPAIKRGILNSIKIVDELVQIIGYPPQNIIIEMARENMTTEEGQKKAKTRKSKLESALKNIEDSVLESGKVPHSDEQLQSEKLYLYYLQNGKDMYSLDKTGSPTPLYRDQLDQYEVDHIIPYSFLPIDSIDNKVLTHRENNQRKLNNIPDKETVANMKPFWEKLYNAKLISQTKYQRLTTSERTPDGVLTESMKAGFIERQLVETRQIIKHVARILDNRFSDTKIITLKSQLVTNFRNTFHIAKIRELNDYHHAHDAYLAVVVGQTLLKAYPKLAPELIYGHHAHFNRHEENKATLRKHLYSNIMRFFNNPDSKVSKDIWDCNRDLPIVKDVIYNSQINFVKRTMIKKGAFYNQNPVGKLNKQIAANNRYPLKTKVSSLDTSIYGGYGPMNSALSIIIIAERFNEKKGKIETVKEFHDIFIIDYEKFNNNPFQFLNNVSEEGFLKKNDLNRVLAFYRISKYSLMQKIDGTRMLFESKSNLHKVTQFKLTKTQNELFFHMKRLLTKSNLMDLKSESAIKESQNFIQTHQNEFDNIADRLSNYSQKMLGETKSLQTLINGYNERPIKQIDNNEETIRYYYDNFIKMFSFVKSGAPKDIINFFNDKYTVPRMRPKPDRKMLDATLIHQSITGLYETRIDLSKLGED

SEQ ID NO: 575 - protein, 1122 aa, Streptococcus suis 89/1591
MSNGKILGLDIGIASVGVGVIDAQTGEIIHASSRIFPSANAANNAERRTFRGSRRLIRRKKHRIKRLDDLFNDFHINLDGEMSTDNPYVLRVKGLSQKLTVEELYISIKNIMKRRGISYLDDAESDNEAGRSDYAKAIERNRQLLTSKTPGEIQLERLEKYGQLRGNFTIIDEEGQSQQIINVFSTSDYVKEVEKILDCQKMYHKFISDEFCDKLIELLREKRKYYVGPGNEKSRTDYGIYRTDGTTLENLFGILIGKCTFYPDQYRSSRASYTAQEFNFLNDLNNLTVPTETKKLSQEQKEFLVNYAKETSVLGAGKILQQIAKLADCKVEDIRGYRLDNKDKPELHTFETYRAMKGLVPLVDIGVLSREQLDILADILTLNTDFEGIREALKKQLPNVFDEKQVKGLASFRKSKSQLFAKGWHNLSQKIMLEVIPELYATSDEQMTILTRLGKFEKSSVAEYPSSINVDEITDEIYNPVVAKSIRQTIKIINASIKKWGEFDQIVIEMPRDRNEDEEKKRIADGQKANAKEKADSILRAAELYCAGKVLPDYVYNGHNQLATKIRLWYQQGERCIYTGQPISIHDLIHNQNQYEIDHILPLSLTFDDSLSNKVLVLATANQEKAQRTPYNYLKSATSAWSYREFKDYVTKRKGIGKKKCEYLTFEEDINGFEVRSKFIQRNLVDTRYASKVILNALQDYFKISGIQTKVSVVRGQFTSQLRHKWGIEKTRETYHHHAVDALIIAASSQLRLWKKQESPLVVDYQEGRQVDLETGEILELTDEQYKELVYQPPYQGFVNTISSSAFDNEILFSYQVDSKVNRKISDATIYATRNAQLGKDKTEGIYVLGKIKDIYTQAGYEAFLKRYTKDKTSFLMYHKDLDTWEKVIEIILRDYREYDEKGKEIGNPFERYRRENGYVKKYSRKGNGTAIKSLKYYDNKLGNHIDITPENSRNAVVLQSLKPWRTDVYFNKETGKYEFLGIKYSDLSFEKGTGEYGISQEKYDSIKIAEGVAKKSIFKFTLYKQDLLFIKDIENNFGKLLRFTSKNDTSKHYVELKPYDKNKFGTEEPLLPVLGNVAKSGQCIKGLNKSNISIYKVRTDILGYRHFIKQEGEHPQLKFKK

SEQ ID NO: 576 - protein, 1122 aa, Streptococcus suis
MSNGKILGLDIGIASVGVGVIDAQTGEIIHASSRIFPSANAANNAERRTFRGSRRLIRRKKHRIKRLDDLFNDFHINLDGEMSTDNPYVLRVKGLSQKLTVEELYISIKNIMKRRGISYLDDAESDNEAGRSDYAKAIERNRQLLTSKTPGEIQLERLEKYGQLRGNFTIIDEEGQSQQIINVFSTSDYVKEVEKILDCQKMYHKFISDEFCDKLIELLREKRKYYVGPGNEKSRTDYGIYRTDGTTLENLFGILIGKCTFYPDQYRSSRASYTAQEFNFLNDLNNLTVPTETKKLSQEQKEFLVNYAKETSVLGAGKILQQIAKLADCKVEDIRGYRLDNKDKPELHTFETYRAMKGLVPLVDIGVLSREQLDILADILTLNTDFEGIREALKKQLPNVFDEKQVKGLASFRKSKSQLFAKGWHNLSQKIMLEVIPELYATSDEQMTILTRLGKFEKSSVAEYPSSINVDEITDEIYNPVVAKSIRQTIKIINASIKKWDEFDQIVIEMPRDRNEDEEKKRIADGQKANAKEKADSILRAAELYCAGKVLPDYVYNGHNQLATKIRLWYQQGERCIYTGQPISIHDLIHNQNQYEIDHILPLSLTFDDSLSNKVLVLATANQEKAQRTPYNYLKSATSAWSYREFKDYVTKRKGIGKKKCEYLTFEEDINGFEVRSKFIQRNLVDTRYASKVILNALQDYFKISGIQTKVSVVRGQFTSQLRHKWGIEKTRETYHHHAVDALIIAASSQLRLWKKQESPLVVDYQEGRQVDLETGEILELTDEQYKELVYQPPYQGFVNTISSSAFDNEILFSYQVDSKVNRKISDATIYATRNAQLGKDKTEGIYVLGKIKDIYTQAGYEAFLKRYTKDKTSFLMYHKDLDTWEKVIEIILRDYREYDEKGKEIGNPFERYRRENGYVKKYSRKGNGTAIKSLKYYDNKLGNHIDITPENSRNAVVLQSLKPWRTDVYFNKETGKYEFLGIKYSDLSFEKGTGEYGISQEKYDSIKIAEGVAKKSIFKFTLYKQDLLFIKDIENNFGKLLRFTSKNDTSKHYVELKPYDKNKFGTEEPLLPVLGNVAKSGQCIKGLNKSNISIYKVRTDILGYRHFIKQEGEHPQLKFKK

SEQ ID NO: 577 - protein, 1381 aa, Streptococcus suis
MVKKKYAIGIDIGTNSVGWSIVTDDYKVPSKKMKVFGNTEKRYIKKNLLGTLLFDEGNTAENRRLKRTARRRYTRRRNRILYLQEIFAEEINKIDDSFFQRLDDSFLIVEDKQGSKHPIFGTLQEEKEYHKQFPTIYHLRKQLADSSQKADIRLIYLALAHIIKYRGHFLFEGDLKSENKDVQHLFNDFVEMFDKTVEGSYLSENLPNVADVLVEKVSKSRRLENILHYFPNEKKNGLFGNFLALALGLQPNFKTNFELAEDAKIQFSKETYEEDLEELLGKIGDDYADLFIATKSLYDGILLAGILSTTDSTTKAPLSSSMVNRYEEHQKDLALLKNFIHQNLSDSYKEVFNDKLKDGYAGYIEGKTTQENFYRFIKKAIEKIEGSNYFIDKIDREDFLRKQRTFDNGSIPHQIHLQEMHAIIRRQAEFYPFLVENQDKIEKILTFRIPYYVGPLARGKSEFAWLNRKSDEKIRPWNFDEMVDKETSAENFITRMTNYDRYLPDQKVLPKHSLLYEKFAVYNELTKVKFIAEGMRDYQFLDSGQKKDIVKTLFKTKRKVTAKDIKAYLENSNGYAGVELKGLEEQFNASLPTYHDLLKILRDKAFIDAEENQEILEDIVLTLTLFEDREMIRKRLEKYKDILTEEQRKKLERRHYTGWGRLSAKLINGILDKVTRKTILGYLIDDGTSNRNFMQLINDDTLSFVDEIRLAQGSGEAEDYRAEVQNLAGSPAIKKGILQSLKIVDELIEVMGYEPEHIVVEMARENQFTNQGRRNSQQRINRLENALKDFGSKILEEQKPYGVSKVNNIHLQSDRLFLYYLQNGKDMYTDEELDIDHLSEYDIDHIIPQAFIKDDSLDNKVLTKSAKNRGKSDDVPSMEIVHNRKNFWRQLLKSKLISQRKFDNLTKAERGGLTNEDKARFIQRQLVETRQITKHVARMLDTRFNTKLDEAGNRIRDPKVNIITLKSNLVSQFRKDYQLYKIREINNYHHAHDAYINAVVATALLKKYPQLAPEFVYGEYPTYNSYNSRKSATEKVLFYSNIMNFFKRIVVHSKTGEVRIRPVIEVNKETGEIVWDKKSDFRTVRKVLSYPQVNVVKKTEVQNHGLDRGKPKGFYNANLSPRPKEGSVENLVPAKQSFDTKRYGGYAGISNSYAVLVNGIIEKGKKKSKAEVTEFQGISILARKDFDKNPKQYLLNLGYKDIKSIIKLPKYSLFELENGSRRMLASILSTNNKRGEIHKGNEMYLPDKFVTLLYHAMRVNRTLEPGHKKYVETHRHVFDELLIYILEYNEKIVGAKANGKRIVEAYSARKDTDNLEELCNSFINLLNLTALGSAVDFEFLGTKIPRYRDYTPSSLLKATLIHQSVTGLYETRIDLSKLGGD

SEQ ID NO: 578 - protein, 1122 aa, Streptococcus suis; identical to SEQ ID NO: 575

SEQ ID NO: 579 - protein, 1388 aa, Streptococcus thermophilus
MTKPYSIGLDIGTNSVGWAVITDNYKVPSKKMKVLGNTSKKYIKKNLLGVLLFDSGITAEGRRLKRTARRRYTRRRNRILYLQEIFSTEMATLDDAFFQRLDDSFLVPDDKRDSKYPIFGNLVEEKVYHDEFPTIYHLRKYLADSTKKADLRLVYLALAHMIKYRGHFLIEGEFNSKNNDIQKNFQDFLDTYNAIFESDLSLENSKQLEEIVKDKISKLEKKDRILKLFPGEKNSGIFSEFLKLIVGNQADFRKCFNLDEKASLHFSKESYDEDLETLLGYIGDDYSDVFLKAKKLYDAILLSGFLTVTDNETEAPLSSAMIKRYNEHKEDLALLKEYIRNISLKTYNEVFKDDTKNGYAGYIDGKTNQEDFYVYLKNLLAEFEGADYFLEKIDREDFLRKQRTFDNGSIPYQIHLQEMRAILDKQAKFYPFLAKNKERIEKILTFRIPYYVGPLARGNSDFAWSIRKRNEKITPWNFEDVIDKESSAEAFINRMTSFDLYLPEEKVLPKHSLLYETFNVYNELTKVRFIAESMRDYQFLDSKQKKDIVRLYFKDKRKVTDKDIIEYLHAIYGYDGIELKGIEKQFNSSLSTYHDLLNIINDKEFLDDSSNEAIIEEIIHTLTIFEDREMIKQRLSKFENIFDKSVLKKLSRRHYTGWGKLSAKLINGIRDEKSGNTILDYLIDDGISNRNFMQLIHDDALSFKKKIQKAQIIGDEDKGNIKEVVKSLPGSPAIKKGILQSIKIVDELVKVMGGRKPESIVVEMARENQYTNQGKSNSQQRLKRLEKSLKELGSKILKENIPAKLSKIDNNALQNDRLYLYYLQNGKDMYTGDDLDIDRLSNYDIDHIIPQAFLKDNSIDNKVLVSSASNRGKSDDFPSLEVVKKRKTFWYQLLKSKLISQRKFDNLTKAERGGLLPEDKAGFIQRQLVETRQITKHVARLLDEKFNNKKDENNRAVRTVKIITLKSTLVSQFRKDFELYKVREINDFHHAHDAYLNAVIASALLKKYPKLEPEFVYGDYPKYNSFRERKSATEKVYFYSNIMNIFKKSISLADGRVIERPLIEVNEETGESVWNKESDLATVRRVLSYPQVNVVKKVEEQNHGLDRGKPKGLFNANLSSKPKPNSNENLVGAKEYLDPKKYGGYAGISNSFAVLVKGTIEKGAKKKITNVLEFQGISILDRINYRKDKLNFLLEKGYKDIELIIELPKYSLFELSDGSRRMLASILSTNNKRGEIHKGNQIFLSQKFVKLLYHAKRISNTINENHRKYVENHKKEFEELFYYILEFNENYVGAKKNGKLLNSAFQSWQNHSIDELCSSFIGPTGSERKGLFELTSRGSAADFEFLGVKIPRYRDYTPSSLLKDATLIHQSVTGLYETRIDLAKLGEG

SEQ ID NO: 580 - protein, 1128 aa, Streptococcus thermophilus
MSDLVLGLDIGIGSVGVGILNKVTGEIIHKNSRIFPAAQAENNLVRRTNRQGRRLTRRKKHRIVRLNRLFEESGLITDFTKISINLNPYQLRVKGLTDELSNEELFIALKNMVKHRGISYLDDASDDGNSSVGDYAQIVKENSKQLETKTPGQIQLERYQTYGQLRGDFTVEKDGKKHRLINVFPTSAYRSEALRILQTQQEFNPQITDEFINRYLEILTGKRKYYHGPGNEKSRTDYGRYRTSGETLDNIFGILIGKCTFYPEEFRAAKASYTAQEFNLLNDLNNLTVPTETKKLSKEQKNQIINYVKNEKAMGPAKLFKYIAKLLSCDVADIKGYRIDKSGKAEIHTFEAYRKMKTLETLDIEQMDRETLDKLAYVLTLNTEREGIQEALEHEFADGSFSQKQVDELVQFRKANSSIFGKGWHNFSVKLMMELIPELYETSEEQMTILTRLGKQKRLRLQIKQNISNKTKYIDEKLLTEEIYNPVVAKSVRQAIKIVNAAIKEYGDFDNIVIEMARETNEDDEKKAIQKIQKANKDEKDAAMLKAANQYNGKAELPHSVFHGHKQLATKIRLWHQQGERCLYTGKTISIHDLINNPNQFEVDHILPLSITFDDSLANKVLVYATANQEKGQRTPYQALDSMDDAWSFRELKAFVRESKTLSNKKKEYLLTEEDISKFDVRKKFIERNLVDTRYASRVVLNALQEHFRAHKIDTKVSVVRGQFTSQLRRHWGIEKTRDTYHHHAVDALIIAASSQLNLWKKQKNTLVSYSEEQLLDIETGELISDDEYKESVFKAPYQHFVDTLKSKEFEDSILFSYQVDSKFNRKISDATIYATRQAKVGKDKKDETYVLGKIKDIYTQDGYDAFMKIYKKDKSKFLMYRHDPQTFEKVIEPILENYPNKQMNEKGKEVPCNPFLKYKEEHGYIRKYSKKGNGPEIKSLKYYDSKLLGNPIDITPENSKNKVVLQSLKPWRTDVYFNKATGKYEILGLKYADLQFEKGTGTYKISQEKYNDIKKKEGVDSDSEFKFTLYKNDLLLVKDTETKEQQLFRFLSRTLPKQKHYVELKPYDKQKFEGGEALIKVLGNVANGGQCIKGLAKSNISIYKVRTDVLGNQHIIKNEGDKPKLDF

SEQ ID NO: 581 - protein, 1121 aa, Streptococcus thermophilus
MSDLVLGLDIGIGSVGVGILNKVTGEIIHKNSRIFPAAQAENNLVRRTNRQGRRLTRRKKHRIVRLNRLFEESGLITDFTKISINLNPYQLRVKGLTDELSNEELFIALKNMVKHRGISYLDDASDDGNSSVGDYAQIVKENSKQLETKTPGQIQLERYQTYGQLRGDFTVEKDGKKHRLINVFPTSAYRSEALRILQTQQEFNPQITDEFINRYLEILTGKRKYYHGPGNEKSRTDYGRYRTSGETLDNIFGILIGKCTFYPDEFRAAKASYTAQEFNLLNDLNNLTVPTETKKLSKEQKNQIINYVKNEKAMGPAKLFKYIAKLLSCDVADIKEYRIDKSGKAEIHTFEAYRKMKTLETLDIEQMDRETLDKLAYVLTLNTEREGIQEALEHEFADGSFSQKQVDELVQFRKANSSIFGKGWHNFSVKLMMELIPELYETSEEQMTILTRLGKQKTTSSSNKTKYIDEKLLTEEIYNPVVAKSVRQAIKIVNAAIKEYGDFDNIVIEMARETNEDDEKKAIQKIQKANKDEKDAAMLKAANQYNGKAELPHSVFHGHKQLATKIRLWHQQGERCLYTGKTISIHDLINNSNQFEVDHILPLSITFDDSLANKVLVYATANQEKGQRTPYQALDSMDDAWSFRELKAFVRESKTLSNKKKEYLLTEEDISKFDVRKKFIERNLVDTRYASRVVLNALQEHFRAHKIDTKVSVVRGQFTSQLRRHWGIEKTRDTYHHHAVDALIIAASIQLNLWKKQKNTLVSYSEDQLLDIETGELISDDEYKESVFKAPYQHFVDTLKSKEFEDSILFSYQVDSKFNRKISDATIYATRQAKVGKDKADETYVLGKIKDIYTQDGYDAFMKIYKKDKSKFLMYRHDPQTFEKVIEPILENYPNKQINEKGKEVPVNPFLKYKEEHGYIRKYSKKGNGPEIKSLKYYDSKLGNHIDITPKDSNNKVVLQSVSPWRADVYFNKTTGKYEILGLKYADLQFEKGTGTYKISQEKYNDIKKKEGVDSDSEFKFTLYKNDLLLVKDTETKEQQLFRFLSRTMPKQKHYVELKPYDKQKFEGGEALIKVLGNVANSGQCKKGLGKSNISIYKVRTDVLGNQHIIKNEGDKPKLDF

SEQ ID NO: 582 - protein, 1388 aa, Streptococcus thermophilus
MTKPYSIGLDIGTNSVGWAVTTDNYKVPSKKMKVLGNTSKKYIKKNLLGVLLFDSGITAEGRRLKRTARRRYTRRRNRILYLQEIFSTEMATLDDAFFQRLDDSFLVPDDKRDSKYPIFGNLVEEKAYHDEFPTIYHLRKYLADSTKKADLRLVYLALAHMIKYRGHFLIEGEFNSKNNDIQKNFQDFLDTYNAIFESDLSLENSKQLEEIVKDKISKLEKKDRILKLFPGEKNSGIFSEFLKLIVGNQADFRKCFNLDEKASLHFSKESYDEDLETLLGYIGDDYSDVFLKAKKLYDAILLSGFLTVTDNETEAPLSSAMIKRYNEHKEDLALLKEYIRNISLKTYNEVFKDDTKNGYAGYIDGKTNQEDFYVYLKKLLAEFEGADYFLEKIDREDFLRKQRTFDNGSIPYQIHLQEMRAILDKQAKFYPFLAKNKERIEKILTFRIPYYVGPLARGNSDFAWSIRKRNEKITPWNFEDVIDKESSAEAFINRMTSFDLYLPEEKVLPKHSLLYETFNVYNELTKVRFIAESMRDYQFLDSKQKKDIVRLYFKDKRKVTDKDIIEYLHAIYGYDGIELKGIEKQFNSSLSTYHDLLNIINDKEFLDDSSNEAIIEEIIHTLTIFEDREMIKQRLSKFENIFDKSVLKKLSRRHYTGWGKLSAKLINGIRDEKSGNTILDYLIDDGISNRNFMQLIHDDALSFKKKIQKAQIIGDEDKGNIKEVVKSLPGSPAIKKGILQSIKIVDELVKVMGGRKPESIVVEMARENQYTNQGKSNSQQRLKRLEKSLKELGSKILKENIPAKLSKIDNNALQNDRLYLYYLQNGKDMYTGDDLDIDRLSNYDIDHIIPQAFLKDNSIDNKVLVSSASNRGKSDDVPSLEVVKKRKTFWYQLLKSKLISQRKFDNLTKAERGGLSPEDKAGFIQRQLVETRQITKHVARLLDEKFNNKKDENNRAVRTVKIITLKSTLVSQFRKDFELYKVREINDFHHAHDAYLNAVVASALLKKYPKLEPEFVYGDYPKYNSFRERKSATEKVYFYSNIMNIFKKSISLADGRVIERPLIEVNEETGESVWNKESDLATVRRVLSYPQVNVVKKVEEQNHGLDRGKPKGLFNANLSSKPKPNSNENLVGAKEYLDPKKYGGYAGISNSFTVLVKGTIEKGAKKKITNVLEFQGISILDRINYRKDKLNFLLEKGYKDIELIIELPKYSLFELSDGSRRMLASILSTNNKRGEIHKGNQIFLSQKFVKLLYHAKRISNTINENHRKYVENHKKEFEELFYYILEFNENYVGAKKNGKLLNSAFQSWQNHSIDELCSSFIGPTGSERKGLFELTSRGSAADFEFLGVKIPRYRDYTPSSLLKDATLIHQSVTGLYETRIDLAKLGEG

SEQ ID NO: 583 - protein, 1121 aa, Streptococcus thermophilus
MSDLVLGLDIGIGSVGVGILNKVTGEIIHKNSRIFPAAQAENNLVRRTNRQGRRLARRKKHRRVRLNRLFEESGLITDFTKISINLNPYQLRVKGLTDELSNEELFIALKNMVKHRGISYLDDASDDGNSSVGDYAQIVKENSKQLETKTPGQIQLERYQTYGQLRGDFTVEKDGKKHRLINVFPTSAYRSEALRILQTQQEFNPQITDEFINRYLEILTGKRKYYHGPGNEKSRTDYGRYRTSGETLDNIFGILIGKCTFYPDEFRAAKASYTAQEFNLLNDLNNLTVPTETKKLSKEQKNQIINYVKNEKAMGPAKLFKYIAKLLSCDVADIKGYRIDKSGKAEIHTFEAYRKMKTLETLDIEQMDRETLDKLAYVLTLNTEREGIQEALEHEFADGSFSQKQVDELVQFRKANSSIFGKGWHNFSVKLMMELIPELYETSEEQMTILTRLGKQKTTSSSNKTKYIDEKLLTEEIYNPVVAKSVRQAIKIVNAAIKEYGDFDNIVIEMARETNEDDEKKAIQKIQKANKDEKDAAMLKAANQYNGKAELPHSVFHGHKQLATKIRLWHQQGERCLYTGKTISIHDLINNSNQFEVDHILPLSITFDDSLANKVLVYATANQEKGQRTPYQALDSMDDAWSFRELKAFVRESKTLSNKKKEYLLTEEDISKFDVRKKFIERNLVDTRYASRVVLNALQEHFRAHKIDTKVSVVRGQFTSQLRRHWGIEKTRDTYHHHAVDALIIAASSQLNLWKKQKNTLVSYSEDQLLDIETGELISDDEYKESVFKAPYQHFVDTLKSKEFEDSILFSYQVDSKFNRKISDATIYATRQAKVGKDKADETYVLGKIKDIYTQDGYDAFMKIYKKDKSKFLMYRHDPQTFEKVIEPILENYPNKQINEKGKEVPCNPFLKYKEEHGYIRKYSKKGNGPEIKSLKYYDSKLGNHIDITPKDSNNKVVLQSVSPWRADVYFNKTTGKYEILGLKYADLQFEKGTGTYKISQEKYNDIKKKEGVDSDSEFKFTLYKNDLLLVKDTETKEQQLFRFLSRTMPKQKHYVELKPYDKQKFEGGEALIKVLGNVANSGQCKKGLGKSNISIYKVRTDVLGNQHIIKNEGDKPKLDF

SEQ ID NO: 584 - protein, 1122 aa, Streptococcus thermophilus
MSDLVLGLDIGIGSVGVGILNKVTGEIIHKNSRIFPAAQAENNLVRRTNRQGRRLTRRKKHRIVRLNRLFEESGLITDFTKISINLNPYQLRVKGLTDELSNEELFIALKNMVKHRGISYLDDASDDGNSSVGDYAQIVKENSKQLETKTPGQIQLERYQTYGQLRGDFTVEKDGKKHRLINVFPTSAYRSEALRILQTQQEFNSQITDEFINRYLEILTGKRKYYHGPGNEKSRTDYGRYRTNGETLDNIFGILIGKCTFYPDEFRAAKASYTAQEFNLLNDLNNLTVPTETKKLSKEQKNQIINYVKNEKVMGPAKLFKYIAKLLSCDVADIKGHRIDKSGKAEIHTFEAYRKMKTLETLDIEQMDRETLDKLAYVLTLNTEREGIQEALEHEFADGSFSQKQVDELVQFRKANSSIFGKGWHNFSVKLMMELIPELYETSEEQMTILTRLGKQKTTSSSNKTKYIDEKLLTEEIYNPVVAKSVRQAIKIVNAAIKEYGDFDNIVIEMARETNEDDEKKAIQKIQKANKDEKDAAMLKAANQYNGKAELPHSVFHGHKQLATKIRLWHQQGERCLYTGKTISIHDLINNPNQFEVDHILPLSITFDDSLANKVLVYATANQEKGQRTPYQALDSMDDAWSFRELKAFVRESKTLSNKKKEYLLTEEDISKFDVRKKFIERNLVDTRYASRVVLNALQEHFRAHKIDTKVSVVRGQFTSQLRRHWGIEKTRDTYHHHAVDALIIAASSQLNLWKKQKNTLVSYSEEQLLDIETGELISDDEYKESVFKAPYQHFVDTLKSKEFEDSILFSYQVDSKFNRKISDATIYATRQAKVGKDKKDETYVLGKIKDIYTQDGYDAFMKIYKKDKSKFLMYRHDPQTFEKVIEPILENYPNKEMNEKGKEVPCNPFLKYKEEHGYIRKYSKKGNGPEIKSLKYYDSKLLGNPIDITPENSKNKVVLQSLKPWRTDVYFNKNTGKYEILGLKYADLQFEKKTGTYKISQEKYNGIMKEEGVDSDSEFKFTLYKNDLLLVKDTETKEQQLFRFLSRTMPNVKYYVELKPYSKDKFEKNESLIEILGSADKSGRCIKGLGKSNISIYKVRTDVLGNQHIIKNEGDKPKLDF

SEQ ID NO: 585 - protein, 1388 aa, Streptococcus thermophilus
MTKPYSIGLDIGTNSVGWAVITDNYKVPSKKMKVLGNTSKKYIKKNLLGVLLFDSGITAEGRRLKRTARRRYTRRRNRILYLQEIFSTEMATLDDAFFQRLDDSFLVPDDKRDSKYPIFGNLVEEKAYHDEFPTIYHLRKYLADSTKKADLRLVYLALAHMIKYRGHFLIEGEFNSKNNDIQKNFQDFLDTYNAIFESDLSLENSKQLEEIVKDKISKLEKKDRILKLFPGEKNSGIFSEFLKLIVGNQADFRKCFNLDEKASLHFSKESYDEDLETLLGYIGDDYSDVFLKAKKLYDAILLSGFLTVTDNETEAPLSSAMIKRYNEHKEDLALLKEYIRNISLKTYNEVFKDDTKNGYAGYIDGKTNQEDFYVYLKNLLAEFEGADYFLEKIDREDFLRKQRTFDNGSIPYQIHLQEMRAILDKQAKFYPFLAKNKERIEKILTFRIPYYVGPLARGNSDFAWSIRKRNEKITPWNFEDVIDKESSAEAFINRMTSFDLYLPEEKVLPKHSLLYETFNVYNELTKVRFIAESMRDYQFLDSKQKKDIVRLYFKDKRKVTDKDIIEYLHAIYGYDGIELKGIEKQFNSSLSTYHDLLNIINDKEFLDDSSNEAIIEEIIHTLTIFEDREMIKQRLSKFENIFDKSVLKKLSRRHYTGWGKLSAKLINGIRDEKSGNTILDYLIDDGISNRNFMQLIHDDALSFKKKIQKAQIIGDEDKGNIKEVVKSLPGSPAIKKGILQSIKIVDELVKVMGGRKPESIVVEMARENQYTNQGKSNSQQRLKRLEKSLKELGSKILKENIPAKLSKIDNNALQNDRLYLYYLQNGKDMYTGDDLDIDRLSNYDIDHIIPQAFLKDNSIDNKVLVSSASNRGKSDDFPSLEVVKKRKTFWYQLLKSKLISQRKFDNLTKAERGGLLPEDKAGFIQRQLVETRQITKHVARLLDEKFNNKKDENNRAVRTVKIITLKSTLVSQFRKDFELYKVREINDFHHAHDAYLNAVIASALLKKYPKLEPEFVYGDYPKYNSFRERKSATEKVYFYSNIMNIFKKSISLADGRVIERPLIEVNEETGESVWNKESDLATVRRVLSYPQVNVVKKVEEQNHGLDRGKPKGLFNANLSSKPKPNSNENLVGAKEYLDPKKYGGYAGISNSFAVLVKGTIEKGAKKKITNVLEFQGISILDRINYRKDKLNFLLEKGYKDIELIIELPKYSLFELSDGSRRMLASILSTNNKRGEIHKGNQIFLSQKFVKLLYHAKRISNTINENHRKYVENHKKEFEELFYYILEFNENYVGAKKNGKLLNSAFQSWQNHSIDELCSSFIGPTGSERKGLFELTSRGSAADFEFLGVKIPRYRDYTPSSLLKDATLIHQSVTGLYETRIDLAKLGEG

SEQ ID NO: 586 - protein, 1121 aa, Streptococcus thermophilus
MSDLVLGLDIGIGSVGVGILNKVTGEIIHKNSRIFPAAQAENNLVRRTNRQGRRLTRRKKHRRVRLNRLFEESGLITDFTKISINLNPYQLRVKGLTDELSNEELFIALKNMVKHRGISYLDDASDDGNSSVGDYAQIVKENSKQLETKTPGQIQLERYQTYGQLRGDFTVEKDGKKHRLINVFPTSAYRSEALRILQTQQEFNPQITDEFVNRYLEILTGKRKYYHGPGNEKSRTDYGRYRTNGETLDNIFGILIGKCTFYPEEFRAAKASYTAQEFNLLNDLNNLTVPTETKKLSKEQKNQIINYVKNEKAMGPAKLFKYIAKLLSCDVADIKGYRIDKSGKAEIHTFEAYRKMKTLETLDIEQMDRETLDKLAYVLTLNTEREGIQEALEHEFADGSFSQKQVDELVQFRKANSSIFGKGWHNFSVKLMMELIPELYETSEEQMTILKRLGKQKTTSSSNKTKYIDEKLLTEEIYNPVVAKSIRQAIKIVNAAIKEYGDFDNIVIEMARETNEDDEKKAIQKIQKANKDEKDAAMLKAANQYNGKAELPHSVFHGHKQLATKIRLWHQQGERCLYTGKTISIHDLINNPNQFEVDHILPLSITFDDSLANKVLVYATANQEKGQRTPYQALDSMDDAWSFRELKAFVRESKTLSNKKKEYLLTEEDISKFDVRKKFIERNLVDTRYASRVVLNALQEHFRAHKIDTKVSVVRGQFTSQLRRHWGIEKTRDTYHHHAVDALIIAASSQLNLWKKQKNTLVSYSEDQLLDIETGELISDDEYKESVFKAPYQHFVDTLKSKEFEDSILFSYQVDSKFNRKISDATIYATRQAKVGKDKKDETYVLGKIKDIYTQDGYDAFMKIYKKDKSKFLMYRHDPQTFEKVIEPILENYPNKEMNEKGKEVPCNPFLKYKEEHGYIRKYSKKGNDPEIKSLKYYDSKLGNHIDITPKDSNNKVVLQSVSPWRADVYFNKTTGKYEILGLKYADLQFEKGTGTYKISQEKYNDIKKKEGVDSDSEFKFTLYKNDLLLVKDTETKEQQLFRFLSRTMPKQKHYVELKPYDKQKFEGGEALIKVLGNVANSGQCKKGLGKSNISIYKVRTDVLGNQHIIKNEGDKPKLDF

SEQ ID NO: 587 - protein, 1122 aa, Streptococcus thermophilus MTCC 5460
MSDLVLGLDIGIGSVGVGILNKVTGEIIHKNSRIFPAAQAENNVERRTNRQGRRLTRRKKHRRVRLNRLFEESGLITDFTKISINLNPYQLRVRGLTDELSNEELFIALKNMVKHRGISYLDDASDDGNSSVGDYAQIVKENSKQLETKTPGQIQLERYQTYGQLRGDFTVEKDGKKHRLINVFPTSAYRSEALRILQTQQEFNSQITDEFINRYLEILTGKRKYYHGPGNEKSRTDYGRYRTSGETLDNIFGILIGKCTFYPEEFRAAKASYTAQEFNLLNDLNNLTVPTETKKLSKEQKNQIINYVKNEKAMGPAKLFKYIAKLLSCDVADIKGYRIDKSGKAEIHTFEAYRKMKTLETLDIEQMDRETLDKLAYVLTLNTEREGIQEALEHEFADGSFSQKQVDELVQFRKASSSIFGKGWHNFSVKLMMELIPELYETSEEQMTILTRLGKQKTTSSSNKTKYIDEKLLTEEIYNPVVAKSVRQAIKIVNAAIKEYGDFDNIVIEMARETNEDDEKKAIQKIQKANKDEKDAAMLKAANQYNGKAELPHSVFHGHKQLATKIRLWHQQGERCLYTGKTISIHDLINNPNQFEVDHILPLSITFDDSLANKVLVYATANQEKGQRTPYQALDSMDDAWSFRELKAFVRESKTLSNKKKEYLLTEEDISKFDVRKKFIERNLVDTRYASRVVLNALQEHFRAHKIDTKVSVVRGQFTSQLRRHWGIEKTRDTYHHHAVDALIIAASSQLNLWKKQKNTLVSYSEDQLLDIETGELISDDEYKESVFKAPYQHFVDTLKSKEFEDSILFSYQVDSKFNRKLSDATIYATRQAKVGKDKKDETYVLGKIKDIYTQDGYDAFMKIYKKDKSKFLMYRHDPQTFEKVIEPILENYPNKEMNEKGKEVPCNPFLKYKEEHGYIRKYSKKGNGPEIKSLKYYDSKLLGNPIDITPENSKNKVVLQSLKPWRADVYFNKTTGKYEILGLKYADLQFEKKTGTYKISQEKYNGIMKEEGVDSDSEFKFTLYKNDLLLVKDTETKEQQLFRFLSRTMPNVKYYVELKPYSKDKFEKNESLIEILGSADKSGRCIKGLGKSNISIYKVRTDVLGNQHIIKNEGDKPKLDF

SEQ ID NO: 588 - protein, 1121 aa, Streptococcus thermophilus
MSDLVLGLDIGIGSVGVGILNKVTGEIIHKNSRIFPAAQAENNLVRRTNRQGRRLTRRKKHRIVRLNRLFEESGLITDFTKISINLNPYQLRVKGLTDELSNEELFIALKNMVKHRGISYLDDASDDGNSSVGDYAQIVKENSKQLETKTPGQIQLERYQTYGQLRGDFTVEKDGKKHRLINVFPTSAYRSEALRILQTQQEFNPQITDEFINRYLEILTGKRKYYHGPGNEKSRTDYGRYRTSGETLDNIFGILIGKCTFYPDEFRAAKASYTAQEFNLLNDLNNLTVPTETKKLSKEQKNQIINYVKNEKAMGPAKLFKYIAKLLSCDVADIKGYRIDKSGKAEIHTFEAYRKMKTLETLDIEQMDRETLDKLAYVLTLNTEREGIQEALEHEFADGSFSQKQVDELVQFRKANSSIFGKGWHNFSVKLMMELIPELYETSEEQMTILTRLGKQKTTSSSNKTKYIDEKLLTEEIYNPVVAKSVRQAIKIVNAAIKEYGDFDNIVIEMARETNEDDEKKAIQKIQKANKDEKDAAMLKAANQYNGKAELPHSVFHGHKQLATKIRLWHQQGERCLYTGKTISIHDLINNSNQFEVDHILPLSITFDDSLANKVLVYATANQEKGQRTPYQALDSMDDAWSFRELKAFVRESKTLSNKKKEYLLTEEDISKFDVRKKFIERNLVDTRYASRVVLNALQEHFRAHKIDTKVSVVRGQFTSQLRRHWGIEKTRDTYHHHAVDALIIAASSQLNLWKKQKNTLVSYSEDQLLDIETGELISDDEYKESVFKAPYQHFVDTLKSKEFEDSILFSYQVDSKFNRKISDATIYATRQAKVGKDKADETYVLGKIKDIYTQDGYDAFMKIYKKDKSKFLMYRHDPQTFEKVIEPILENYPNKQMNEKGKEVPCNPFLKYKEEHGYIRKYSKKGNGPEIKSLKYYDSKLGNHIDITPKDSNNKVVLQSVSPWRADIYFNNTTGKYEILGLKYADLQFEKGTGTYKISQEKYNDIKKKEGVDSDSEFKFTLYKNDLLLVKETETKEQQLFRFLSRTMPKQKHYVELKPYDKQKFEGGEALIKVLGNVANGGQCIKGLGKSNISIYKVRTDVLGNQHIIKNEGDKPKLDF

SEQ ID NO: 589 - protein, 1388 aa, Streptococcus thermophilus
MTKPYSIGLDIGTNSVGWAVITDNYKVPSKKMKVLGNTSKKYIKKNLLGVLLFDSGITAEGRRLKRTARRRYTRRRNRILYLQEIFSTEMATLDDAFFQRLDDSFLVPDDKRDSKYPIFGNLVEEKAYHDEFPTIYHLRKYLADSTKKADLRLVYLALAHMIKYRGHFLIEGEFNSKNNDIQKNFQDFLDTYNAIFESDLSLENSKQLEEIVKDKISKLEKKDRILKLFPGEKNSGIFSEFLKLIVGNQADFRKCFNLDEKASLHFSKESYDEDLETLLGYIGDDYSDVFLKAKKLYDAILLSGFLTVTDNETEAPLSSAMIKRYNEHKEDLALLKEYIRNISLKTYNEVFKDDTKNGYAGYIDGKTNQEDFYVYLKNLLAEFEGADYFLEKIDREDFLRKQRTFDNGSIPYQIHLQEMRAILDKQAKFYPFLAKNKERIEKILTFRIPYYVGPLARGNSDFAWSIRKRNEKITPWNFEDVIDKESSAEAFINRMTSFDLYLPEEKVLPKHSLLYETFNVYNELTKVRFIAESMRDYQFLDSKQKKDIVRLYFKDKRKVTDKDIIEYLHAIYGYDGIELKGIEKQFNSSLSTYHDLLNIINDKEFLDDSSNEAIIEEIIHTLTIFEDREMIKQRLSKFENIFDKSVLKKLSRRHYTGWGKLSAKLINGIRDEKSGNTILDYLIDDGISNRNFMQLIHDDALSFKKKIQKAQIIGDEDKGNIKEVVKSLPGSPAIKKGILQSIKIVDELVKVMGGRKPESIVVEMARENQYTNQGKSNSQQRLKRLEKSLKELGSKILKENIPAKLSKIDNNALQNDRLYLYYLQNGKDMYTGDDLDIDRLSNYDIDHIIPQAFLKDNSIDNKVLVSSASNRGKSDDFPSLEVVKKRKTFWYQLLKSKLISQRKFDNLTKAERGGLLPEDKAGFIQRQLVETRQITKHVARLLDEKFNNKKDENNRAVRTVKIITLKSTLVSQFRKDFELYKVCEINDFHHAHDAYLNAVIASALLKKYPKLEPEFVYGDYPKYNSFRERKSATEKVYFYSNIMNIFKKSISLADGRVIERPLIEVNEETGESVWNKESDLATVRRVLSYPQVNVVKKVEEQNHGLDRGKPKGLFNANLSSKPKPNSNENLVGAKEYLDPKKYGGYAGISNSFAVLVKGTIEKGAKKKITNVLEFQGISILDRINYRKDKLNFLLEKGYKDIELIIELPKYSLFELSDGSRRMLASILSTNNKRGEIHKGNQIFLSQKFVKLLYHAKRISNTINENHRKYVENHKKEFEELFYYILEFNENYVGAKKNGKLLNSAFQSWQNHSIDELCSSFIGPTGSERKGLFELTSRGSAADFEFLGVKIPRYRDYTPSSLLKDATLIHQSVTGLYETRIDLAKLGEG

SEQ ID NO: 590 - protein, 1128 aa, Streptococcus vestibularis ATCC 49124
MSDLVLGLDIGIGSVGVGILNKVTGEIIHKNSRIFPAAQAENNVERRTNRQGRRLTRRKKHRRVRLNHLFEESGLITDFTKVSINLNPYQLRVKGLIDELSNEELFIALKNMVKHRGISYLDDASDDGNSSVGDYAQIVKENSKQLETKTPGQIQLERYQKYGQLRGDFTVEEDGKKHRLINVFPTSAYRSEALRILQTQKEFNPQITDEFINRYLEILTGKRKYYHGPGNEKSRTDYGRYTTKKDSENEYITLDNIFGILIGKCTFYPEEYRAAKASYTAQEFNLLNDLNNLTVPTETKKLSEEQKNQIINYVKNEKAMGPAKLFKYIAKLLSCDVADIKGYRIDKSDKAEIHTFEAYRKMKTLETIDFEKMSRDQLDKLAYVLTLNTEREGIQEALDHEFADGNFSQEQIDELVQFRKANSSIFGKGWHNFSVKLMMELIPELYATSEEQMTILTRLGKQKTTSSSNKTKYIDEKLLTEEIYNPVVAKSVRQAIKIVNAAIKEYGDFDNIVIEMARETNEDDEKKAIQKIQKANKDEKDAAMLKAANQYNGRAELPHSVFHGHKQLATKIRLWHQQGERCLYTGKTISIHDLINNPNQFEIDHILPLSITFDDSLANKVLVYATANQEKGQRTPYQALDSMDDAWSFRELKAFVRESKSLSNKKKEYLLTEEDISRFDVRKKFIERNLVDTRYASRVVLNALQEHFRAHKTDTKVSVVRGQFTSQLRRHWGIEKTRDTYHHHAVDALIIAASSQLNLWKKQKNTLVNYSENQLLDIETGELISDDEYKESVFKAPYQHFVDTLKSKEFEDSILFSYQVDSKFNRKISDATIYATRQAKVGKDKKDETYVLGKIKDIYSQTGYDAFIKIYQKDKSKFLMYRHDPQTFEKVIEPILENYPNKEMNEKGKEVPCNPFLKYKEEHGDYIRKYSKKGNGPEIKSLKYYDSKLGNHIDITPKDSNNKVVLQSVSPWRADVYFNKTTGKYEILGLKYADLQFEKGTGTYKISQEKYNVIKKKEGVDSDSEFKFTLYKNDLLLIKDTETKEQQLFRFLSRTKPNVKHYVELKPYDKQKFEGNESLINVLGAVAKGGQCQKGINKPNISIYKVRTDVLGNQHIIKNEGDKPKLDF

SEQ ID NO: 591 - protein, 1084 aa, Subdoligranulum sp. 4_3_54A2FAA
MKNTLYGIGLDIGVASVGWAVVGLNGTGEPVGLHRLGVRIFDKAEQPKTGESLAAPRRMARGMRRRLRRKALRRADVYALLERSGLSTREELAQMFEAGGLEDIYALRTRALDEPVGKAEFSRILLHLAQRRGFKSNRRTASDGEDGRLLAAVNENRRRMAQGGWRTVGEMLYRHEAFALHKRNKADDYLSTVGRDMVAEEASILFERQRAMGCSWAAPELQAEYLSILLRQRSFDEGPGGNSPYGGNQVEKMVGRCTFEPDEPRAAKAAYSFEYFSLLQKLNHIRLAENGETRPLTQPQRQQLLSLAHKTPDISLARIRKELALPETVQFNGVRCRANETLEESEKKEKFACLPAYHKMRKALDGVVKGRISSLSISQRDAAATALSLYKNEDTLRAKLTEAGFQAPEIDALAGLTGFSKFGHLSLKACRKLIPHLEQGLTYDQACTAAGYDFKGHGAGERAFTLPAAAPEMEQITSPVVRRAVAQTIKVVNGIIREMDASPAWVRIELARELSKTFGERQEMDRSMRENAAQNERLMQELRDTFHLLSPTGQDLVKYRLWKEQDGVCAYSLRRLDVERLFEPGYVDVDHIVPYSLSFDDRRSNKVLVLSSENRQKGNRLPLQYLQGKRREDFIVWTNSSVHDYRKRQNLLREKLSGDEAEGFRQRNLQDTQHMARFLYNYISDHLAFAQSEALGKKRVFAVSGAVTSHLRKRWGLSKVRADGDLHHALDAAVVACTTDGMIRRISGYYGHIEGEYLQDADGAGSQHARTKERFPAPWPRFRDELIVRLSEQPAEPLLDINPEFYCEYGTEHIRPVFVSRMPRRKVTGPGHKETIKGAAAADEGLLTVRKALTELKLDKDGEIKDYYMPSSDTLLYEALKAQLRRFGGDGKKAFAEPFYKPKADGTPGPLVRKVKTTEKATLTVPVHGGAASNDTMVRVDVFLVPGDGYYWVPVYTADTLKPELPNRAVVQGKPYSEWKEMREEDFIFSLYPNDLVYVEHKSGLKFTLQNADSTLEKTRTQTSAFAYFVSGSISTASITIRTHDNAYGIPSLGVKTLKTFHKYQVDVLGNVFPVHKETRQKFR

SEQ ID NO: 592 - protein, 1422 aa, Sutterella wadsworthensis 3_1_45B
MTQSERRFSCSIGIDMGAKYTGVFYALFDREELPTNLNSKAMTLVMPETGPRYVQAQRTAVRHRLRGQKRYTLARKLAFLVVDDMIKKQEKRLTDEEWKRGREALSGLLKRRGYSRPNADGEDLTPLENVRADVFAAHPAFSTYFSEVRSLAEQWEEFTANISNVEKFLGDPNIPADKEFIEFAVAEGLIDKTEKKAYQSALSTLRANANVLTGLRQMGHKPRSEYFKAIEADLKKDSRLAKINEAFGGAERLARLLGNLSNLQLRAERWYFNAPDIMKDRGWEPDRFKKTLVRAFKFFHPAKDQNKQHLELIKQIENSEDIIETLCTLDPNRTIPPYEDQNNRRPPLDQTLLLSPEKLTRQYGEIWKTWSARLTSAEPTLAPAAEILERSTDRKSRVAVNGHEPLPTLAYQLSYALQRAFDRSKALDPYALRALAAGSKSNKLTSARTALENCIGGQNVKTFLDCARRYYREADDAKVGLWFDNADGLLERSDLHPPMKKKILPLLVANILQTDETTGQKFLDEIWRKQIKGRETVASRCARIETVRKSFGGGFNIAYNTAQYREVNKLPRNAQDKELLTIRDRVAETADFIAANLGLSDEQKRKFANPFSLAQFYTLIETEVSGFSATTLAVHLENAWRMTIKDAVINGETVRAAQCSRLPAETARPFDGLVRRLVDRQAWEIAKRVSTDIQSKVDFSNGIVDVSIFVEENKFEFSASVADLKKNKRVKDKMLSEAEKLETRWLIKNERIKKASRGTCPYTGDRLAEGGEIDHILPRSLIKDARGIVFNAEPNLIYASSRGNQLKKNQRYSLSDLKANYRNEIFKTSNIAAITAEIEDVVTKLQQTHRLKFFDLLNEHEQDCVRHALFLDDGSEARDAVLELLATQRRTRVNGTQIWMIKNLANKIREELQNWCKTTNNRLHFQAAATNVSDAKNLRLKLAQNQPDFEKPDIQPIASHSIDALCSFAVGSADAERDQNGFDYLDGKTVLGLYPQSCEVIHLQAKPQEEKSHFDSVAIFKEGIYAEQFLPIFTLNEKIWIGYETLNAKGERCGAIEVSGKQPKELLEMLAPFFNKPVGDLSAHATYRILKKPAYEFLAKAALQPLSAEEKRLAALLDALRYCTSRKSLMSLFMAANGKSLKKREDVLKPKLFQLKVELKGEKSFKLNGSLTLPVKQDWLRICDSPELADAFGKPCSADELTSKLARIWKRPVMRDLAHAPVRREFSLPAIDNPSGGFRIRRTNLFGNELYQVHAINAKKYRGFASAGSNVDWSKGILFNELQHENLTECGGRFITSADVTPMSEWRKVVAEDNLSIWIAPGTEGRRYVRVETTFIQASHWFEQSVENWAITSPLSLPASFKVDKPAEFQKAVGTELSELLGQPRSEIFIENVGNAKHIRFWYIVVSSNKKMNESYNNVSKS

SEQ ID NO: 593 - protein, 1049 aa, Tistrella mobilis
MINERLTFGIDLGIGSCGWAVLRHADAAGEPGVIEGLGSWCFDVPETSKERIPTNQVRRSNRLLRRVIRRRRNRMAEIRRLFHAQGLLPSADEDALKRPRLDPWELRARGLDQCLSAEEFAVALGHIARHRGFRSSAKRKAANTSGEDSKMLSALLVTRERTARYRTVGEMFARDPEYSARRRNRDGIFDRTVARDDLIHEVGKLFEAQRARGSAFASPDLEADFNAIAFRQAEMQDSERLVGNCPFERDEKRAARWAPSFERFRLLTRLINLRIATAEGERRFTPEDLARVSAELGATAKLPVSRVRALIGLLPDERFTTIRVEDEDRDIVARTGEAAPGTWRLRKTLGEALWAEMQARPDQLDAIAHVLSFFEATAKIRSELDRLGLPAAVIEALDRGLEDGAFAKFKGAGHISAKACRNLLPHLQQGHRYDQACRLAGYDHAASTLSHTAQVVSKAGFNALVTELGESIANPIARKALTEGLKQIRAMCARWGLPGAIHIELAREVGNSIEKRRELESQRETTTKRRQTERDEIRGLLALEDVDDDTLLRYRLWKEQGGKCLYTGKDIHVRQLIATDNSVQVDHILPWSRFGDDSFNNKTLCLASANQRKRGQTPWEWFSLTGTPEAWEVFASRVETSKDLRGFKKRNLLLKNADEVAQRFRSRNLNDTRYAARLLAEAAKLFYPAGDRQEKDGRRRVLTRPGPLTAALRHAWGLESLKKADGKRVSDDRHHALDALAVAAISEREVQRLTRSFQEWEQQGLARPLRHVAPPWPGFRGDVLAAYAQAFVARPERRRARGKGHDASIRQVVGEGPEAQVFERRGLADLKEADLDRVKDPERNQAIIEAVRAWILAGRPADAPPRSPRGDVIVKLRTAPAKKIKPAVPVRGGTADRGDMVRIDVFTRPNRKGRDEWYLVPIYPHQVMNRKAWPHPPMRSVVAYKDEAGWTEIGAEHSFRFSLYPRSYVQLVKSNGDVIEGYLVSMDRSTGAFRVFVHNNPAEMAKGIGAKTLLNLRKFNVDRFGVRTEVKSEVRTWHGEVCTSPVPPD

SEQ ID NO: 594 - protein, 1395 aa, Treponema denticola AL-2
MKKEIKDYFLGLDVGTGSVGWAVTDTDYKLLKANRKDLWGMRCFETAETAEVRRLHRGARRRIERRKKRIKLLQELFSQEIAKIDEGFFQRMKESPFYAEDKTILQENALFNDKDFTDKTYHKAYPTINHLIKAWIENKVKPDPRLLYLACHNIIKKRGHFLFEGDFDSENQFDTSIQALFEYLREDMEVDIDADSQKVKEILKDSSLKNSEKQSRLNKILGLKPSDKQKKAITNLISGNKINFADLYDNPDLKDAEKNSISFSKDDFDALSDDLASILGDSFELLLKAKAVYNCSVLSKVIGDEQYLSFAKVKIYEKHKTDLTKLKAVIKKHFPNNYKKVFGYNQDNESKNNYSGYVGVCKTKNKKLVINNSVNQEDFYKFLKPILSAKSEIKEVNDILAEIETGNFLPKQISKSNAEIPYQLRKMELEKILSNAEKHFSFLKQKDEKGLSHSEKIIMLLTFKIPYYIGPINDNHKKSFPDRCWVVKKEKSPSGKTTPWNFFDHIDKEKTAEEFITSRTNFCTYLIGESVLPKNSLLYSEYTVLNEINNLQIIIDGKNICDTKLKQKIYEDLFKKYKKITQKQISTFIKHEGICNKTDEVIILGIDKECTSSLKSYIELKNIFGKQVDEISTKNMLEEIIRWATIYDEGEGKTILKTKIKAEYGKYCSDEQIKKILNLKFSGWGRLSRKFLETVTSEMPGFSEPVNIITAMRETQNNLMELLSSEFKFTENIKKINSGFEDAEKQFSYDGLVKPLFLSPSVKKMLWQTLKLVKEISHITQAPPKKIFIEMAKGAELEPARTKTRLKILQDLYSSCKNDADAFSSEIQYLSGKIENEDNLRLRSDKLYLYYTQLGKCMYCGKPIEIGHVFDTSNYDIDHIYPQSKIKDDSISNRVLVCSSCNKNKEDKYPLKSEIQSKQRGFWNFLQRNNFISLEKLNRLTRTTPISDDETAKFIARQLVETRQATKVAAKVLEKMFPETKIVYSKAETVSMFRNKFDIIKCREINDFHHAHDAYLNIVVGNVYNTKFTNNPWNFIKEKRDNPKIADTYNYYKVFDYDVKRNNITAWEKGKTIITVKDMLKRNTPIYTRQAACKKGGLFDQTIMKKGLGQHPLKKEGPFSNISKYGGYNKVSAAYYTLIEYEEKGNKIRSLETIPLYLVKDIQKDQDVLKSYLTDLLGKKEFKILVPKIKINSLLKINGFPCHITGKTNDSFLLRPAVQFCCSNDEVLYFKKIIRFSEIRSQREKIGKTISPYEDLSFRSYIKENLCKKTKNDEIGEKEFYDLLQKKNLEIYDMLLTKHKDTIYKKRPNSATIDILVKGKEKFKSLIIENQFEVILEILKLFSATRNVSELQHIGGSKYSGVAKIGNKISSLDNCILIYQSITGIFEKRIDLLKV

SEQ ID NO: 595 - protein, 1395 aa, Treponema denticola ASLM
MKKEIKDYFLGLDVGTGSVGWAVTDTDYKLLKANRKDLWGMRCFETAETAEVRRLHRGARRRIERRKKRIKLLQELFSQEIAKIDEGFFQRMKESPLYAEDKTILQENTLFNDKDFTDKTYHKAYPTINHLIKAWIENKVKPDPRLLYLACHNIIKKRGHFLFEGDFDSENQFDTSIQALFEYLREDMEVDIDADSQKVKEILKDSSLKNSEKQSRLNKMLGLKPSDKQKKAITNLISGNKINFADLYDNPDLKDAEKNSISFSKDDFDALSDDLASILGDSFELLLKAKAVYNCSVLSKVIGDEQYLSFAKVKIYEKHKTDLTKLKNVIKKHFPKDYKKVFGYNKNEKNNNNYSGYVGVCKTKSKKLIINNSVNQEDFYKFLKTILSAKSEIKEVNDILTEIETGTFLPKQISKSNAEIPYQLRKMELEKILSNAEKHFSFLKQKDEKGLSHSEKIIMLLTFKIPYYIGPINDNHKKSFPDRCWVVKKEKSPSGKTTPWNFFDHIDKEKTAEEFITSRTNFCTYLIGESVLPKNSLLYSEYTVLNEINNLQIIIDGKNICDTKLKQKIYEELFKKYKKITQKQISTFIKHEGICNKTDEVIILGIDKECTSSLKSYIELKNIFGKQVDEISTKNMLEEIIRWATIYDEGEGKTILKTKIKAEYGKYCSDEQIKKILNLKFSGWGRLSRKFLETVTSEMPGFSEPVNIITAMRETQNNLMELLSSEFKFTENIKKINSGFEDVEKQFSYDGLVKPLFLSPSVKKMLWQTLKLVKEISHITQAPPKKIFIEMAKGAELDPVRTKTRLKILQDLYNNCKNDADAFSSEIKDLSGKIENEDNLRLRSDKLYLYYTQLGKCMYCGKPIEIGHVFDTSNYDIDHIYPQSKIKDDSISNRVLVCSSCNKNKEDKYPLKAEIQSKQRGFWNFLQRNNFISLEKFNRLTRATPISDDETAKFIARQLVETRQATKVAARVLEKMFPETKIVYSKAETVSMFRNKFDIVKCREINDFHHAHDAYLNIVVGNVYNTKFTNNLWNFIKEKRDNPKIADTYNYYKVFDYDVKRNNITAWEKGKTIITVKDMLKRNTPIYTRQAACKKGGLFDQTIMKKGLGQHPLKKEGPFSNISKYGGYNKVSAAYYTLIEYEEKGNKIRSLETIPLYLVKDIQKDQDVLKSYLTDLLGKKEFKILVPKIKINSLLKINGFPCHITGKTNDSFLLRPAVQFCCSNDEVLYFKKIIRFSEIRSQREKIGKTISPYEDLSFRSYIKENLCKKTKNDEIGEKEFYDLLQKKNLEIYDMLLTKHKDTIYKKRPNSATIDILVKGKEKFKSLIIENQFEVILEILKLFSATRNVSDLQHIGGSKYSGVAKIGNKISSLDNCILIYQSITGIFEKRIDLLKV

SEQ ID NO: 596 - protein, 1395 aa, Treponema denticola ATCC 35405
MKKEIKDYFLGLDVGTGSVGWAVTDTDYKLLKANRKDLWGMRCFETAETAEVRRLHRGARRRIERRKKRIKLLQELFSQEIAKTDEGFFQRMKESPFYAEDKTILQENTLFNDKDFADKTYHKAYPTINHLIKAWIENKVKPDPRLLYLACHNIIKKRGHFLFEGDFDSENQFDTSIQALFEYLREDMEVDIDADSQKVKEILKDSSLKNSEKQSRLNKILGLKPSDKQKKAITNLISGNKINFADLYDNPDLKDAEKNSISFSKDDFDALSDDLASILGDSFELLLKAKAVYNCSVLSKVIGDEQYLSFAKVKIYEKHKTDLTKLKNVIKKHFPKDYKKVFGYNKNEKNNNNYSGYVGVCKTKSKKLIINNSVNQEDFYKFLKTILSAKSEIKEVNDILTEIETGTFLPKQISKSNAEIPYQLRKMELEKILSNAEKHFSFLKQKDEKGLSHSEKIIMLLTFKIPYYIGPINDNHKKFFPDRCWVVKKEKSPSGKTTPWNFFDHIDKEKTAEAFITSRTNFCTYLVGESVLPKSSLLYSEYTVLNEINNLQIIIDGKNICDIKLKQKIYEDLFKKYKKITQKQISTFIKHEGICNKTDEVIILGIDKECTSSLKSYIELKNIFGKQVDEISTKNMLEEIIRWATIYDEGEGKTILKTKIKAEYGKYCSDEQIKKILNLKFSGWGRLSRKFLETVTSEMPGFSEPVNIITAMRETQNNLMELLSSEFTFTENIKKINSGFEDAEKQFSYDGLVKPLFLSPSVKKMLWQTLKLVKEISHITQAPPKKIFIEMAKGAELEPARTKTRLKILQDLYNNCKNDADAFSSEIKDLSGKIENEDNLRLRSDKLYLYYTQLGKCMYCGKPIEIGHVFDTSNYDIDHIYPQSKIKDDSISNRVLVCSSCNKNKEDKYPLKSEIQSKQRGFWNFLQRNNFISLEKLNRLTRATPISDDETAKFIARQLVETRQATKVAAKVLEKMFPETKIVYSKAETVSMFRNKFDIVKCREINDFHHAHDAYLNIVVGNVYNTKFTNNPWNFIKEKRDNPKIADTYNYYKVFDYDVKRNNITAWEKGKTIITVKDMLKRNTPIYTRQAACKKGELFNQTIMKKGLGQHPLKKEGPFSNISKYGGYNKVSAAYYTLIEYEEKGNKIRSLETIPLYLVKDIQKDQDVLKSYLTDLLGKKEFKILVPKIKINSLLKINGFPCHITGKTNDSFLLRPAVQFCCSNNEVLYFKKIIRFSEIRSQREKIGKTISPYEDLSFRSYIKENLWKKTKNDEIGEKEFYDLLQKKNLEIYDMLLTKHKDTIYKKRPNSATIDILVKGKEKFKSLIIENQFEVILEILKLFSATRNVSDLQHIGGSKYSGVAKIGNKISSLDNCILIYQSITGIFEKRIDLLKV

SEQ ID NO: 597 - protein, 1395 aa, Treponema denticola H1-T
MKKEIKDYFLGLDVGTGSVGWAVTDTDYKLLKANRKDLWGMRCFETAETAEVRRLHRGARRRIERRKKRIKLLQELFSQEIAKIDEGFFQRMKESPFYAEDKTILQENALFNDKDFTDKTYHKAYPTINHLIKAWIENKVKPDPRLLYLACHNIIKKRGHFLFEGDFDSENQFDTSIQALFEYLREDMEVDIDADSQKVKEILKDSSLKNSEKQSRLNKILGLKPSDKQKKAITNLISGNKINFADLYDNPDLKDAEKNSISFSKDDFDALSDDLASILGDSFELLLKAKAVYNCSVLSKVIGDEQYLSFAKVKIYEKHKTDLTKLKAVIKKHFPNNYKKVFGYNQDNESKNNYSGYVGVCKTKNKKLVINNSVNQEDFYKFLKPILSAKSEIKEVNDILAEIETGNFLPKQISKSNAEIPYQLRKMELEKILSNAEKHFSFLKQKDEKGLSHSEKIIMLLTFKIPYYIGPINDNHKKSFPDRCWVVKKEKSPSGKTTPWNFFDHIDKEKTAEEFITSRTNFCTYLIGESVLPKNSLLYSEYTVLNEINNLQIIIDGKNICDTKLKQKIYEDLFKKYKKITQKQISTFIKHEGICNKTDEVIILGIDKECTSSLKSYIELKNIFGKQVDEISTKNMLEEIIRWATIYDEGEGKTILKTKIKAEYGKYCSDEQIKKILNLKFSGWGRLSRKFLETVTSEMPGFSEPVNIITAMRETQNNLMELLSSEFKFTENIKKINSGFEDAEKQFSYDGLVKPLFLSPSVKKMLWQTLKLVKEISHITQAPPKKIFIEMAKGAELEPARTKTRLKILQDLYSSCKNDADAFSSEIQYLSGKIENEDNLRLRSDKLYLYYTQLGKCMYCGKPIEIGHVFDTSNYDIDHIYPQSKIKDDSISNRVLVCSSCNKNKEDKYPLKSEIQSKQRGFWNFLQRNNFISLEKLNRLTRTTPISDDETAKFIARQLVETRQATKVAAKVLEKMFPETKIVYSKAETVSMFRNKFDIIKCREINDFHHAHDAYLNIVVGNVYNTKFTNNPWNFIKEKRDNPKIADTYNYYKVFDYDVKRNNITAWEKGKTIITVKDMLKRNTPIYTRQAACKKGELFNQTIMKKGLGQHPLKKEGPFSNISKYGGYNKVSAAYYTLIEYEEKVNKIRSLETIPLYLVKDIQKDQDVLKSYLTDLLGKKEIKILVPKIKINSLLKINGFPCHITGKTGDSFVLRPAVQFCCSNDEVLYFKKIIRFNEIRSQREKMGKTISPYEDLSFRSYIKENLCKKTKADEIGEKEFYDLLQKKNLEIYDMLLTKHKDTIYNKRPNSTTLGMLTKGRYEFINLKPKDQIIVMLEILKLFCTTREAIDLGLIKGKPAAGVATLGKKISNLDNCILIYQSITGIFEKRIDLLKV

SEQ ID NO: 598 - protein, 1395 aa, Treponema denticola H-22
MKKEIKDYFLGLDVGTGSVGWAVTDTDYKLLKANRKDLWGMRCFETAETAEVRRLHRGARRRIERRKKRIKLLQELFSQEIAKIDEGFFQRMKESPFYAEDKTILQENTLFNDKDFTDKTYHKAYPTINHLIKAWIENKVKPDPRLLYLACHNIIKKRGHFLFEGDFDSENQFDTSIQALFEYLREDMEVDIDADSQKVKEILKDSSLKNSEKQSRLNKILGLKPSDKQKKAITNLISGNKINFADLYDNPDLKDAEKNSISFSKDDFDALSDDLASILGDSFELLLKAKAVYNCSVLSKVIGDEQYLSFAKVKIYEKHKTDLTKLKNVIKKHFPKDYKKVFGYNKNEKNNNNYSGYVGVCKTKSKKLIINNSVNQEDFYKFLKTILSAKSEIKEVNDILTEIETGTFLPKQISKSNAEIPYQLRKMELEKILSNAEKHFSFLKQKDEKGLSHSEKIIMLLTFKIPYYIGPINDNHKKSFPDRCWVIKKEKSPSGKTTPWNFFDHIDKDKTAEAFITSRTNFCTYLVGESVLPKSSLLYSEYTVLNEINNLQIIIDGKNICDIKLKQKIYEELFKKYKKITQKQISTFIKHEGICNKTDEVIILGIDKECTSSLKSYIELKNIFGKQVDEISTKNMLEEIIRWATIYDEGEGKTILKTKIKAEYGKYCSDEQIKKILNLKFSGWGRLSRKFLETVTSEMPGFSEPVNIITAMRETQNNLMELLSSEFKFTENIKKINSGFEDAEKQFSYNGLVKPLFLSPSVKKMLWQTLKLVKEISHITQAPPKKIFIEMAKGAELEPARTKTRLKILQDLYNNCKNDADAFSSEIKDLSGKIENEDNLRLRSDKLYLYYTQLGKCMYCGKPIEIGHVFDTSNYDIDHIYPQSKIKDDSISNRVLVCSSCNKNKEDKYPLKSEIQSKQRGFWNFLQRNNFISLEKLNRLTRTTPISDDETAKFIARQLVETRQATKVAAKVLEKMFPETKIVYSKAETVSMFRNKFDIIKCREINDFHHAHDAYLNIVVGNVYNTKFTNNPWNFIKEKRDNPKIADTYNYYKVFDYDVKRNNITAWEKGKTIITVKDMLKRNTPIYTRQAACKKGGLFDQTIMKKGLGQHPLKKEGAFSNISKYGGYNKVSAAYYTLIEYEEKGNKIRSLETIPLYLVKDIQKDQDVLKSYLTDLLGKKEIKILVPKIKINSLLKINGFPCHITGKTGDSFVLRPAVQFCCSNDEVLYFKKIIRFNEIRSQREKMGKTISPYEDLSFRSYIKENLCKKTKADEIGEKEFYDLLQKKNLEIYDMLLTKHKDTIYNKRPNSTTLGMLTKGRYEFINLKPKDQIIVMLEILKLFCTTREAIDLGLIKGKPAAGVATLGKKISNPDNCILIYQSITGIFEKRIDLLKV

SEQ ID NO: 599 - protein, 1395 aa, Treponema denticola OTK
MKKEIKDYFLGLDVGTGSVGWAVTDTDYKLLKANRKDLWGMRCFETAETAEVRRLHRGARRRIERRKKRIKLLQELFSQEIAKIDEGFFQRMKESPLYAEDKTILQENTLFNDKDFTDKTYHKAYPTINHLIKAWIENKVKPDPRLLYLACHNIIKKRGHFLFEGDFDSENQFDTSIQALFEYLREDMELDIDADSQKVKEILKDSSLKNSEKQSRLNKMLGLKPSDKQKKAITNLISGNKINFADLYDNPDLKDAEKNSISFSKDDFDALSDDLASILGDSFELLLKAKAVYNCSVLSKVIGDEQYLSFAKVKIYEKHKTDLTKLKNVIKKHFPKDYKKVFGYNKNEKNNNNYSAYVGVCKITHKKLVIKNSASQEDFYKFLKTILSAKSEIKEVNDILTEIETGTFLPKQISKSNAEIPYQLRKMELEKILSNAEKHFSFLKQKDEKGLSHSEKIIMLLTFKIPYYIGPINDNHKKSFPDRCWVVKKEKSPSGKTTPWNFFDHIDKEKTAEEFITSRTNFCTYLIGESVLPKSSLLYSEYTVLNEINNLQIIIDGKNICDIKLKQKIYEELFKKYKKITQKQISTFIKHEGICNKTDEVIILGIDKECTSSLKSYIELKNIFGKQVDEISTKNMLEEIIRWATIYDEGEGKTILKTKIKAEYGKYCSDEQIKKILNLKFSGWGRLSRKFLETVTSEMPGFSEPVNIITAMRETQNNLMELLSSEFKFTENIKKINSGFEDAEKQFSYNGLVKPLFLSPSVKKMLWQTLKLVKEISHITQAPPKKIFIEMAKGAELEPARTKTRLKILQDLYSSCKNDADAFSSEIQYLSGKIENEDNLRLRSDKLYLYYTQLGKCMYCGKPIEIGHVFDTSNYDIDHIYPQSKIKDDSISNRVLVCSSCNKNKEDKYPLKAEIQSKQRGFWNFLQRNNFISLEKLNRLTRTSPISDDETAKFIARQLVETRQATKVAAKVLEKMFPETKIVYSKAETVSMFRNKFDIIKCREINDFHHAHDAYLNIVVGNVYNTKFTNNPWNFIKEKRDNPKIADTYNYYKVFDYDVKRNNITAWEKGKTIITVKDMLKRNTPIYTRQAACKKGELFNQTIMKKGLGQHPLKKEGPLSNISKYGGYNKVSAAYYTLIEYEEKGSKIRSLETIPLYLVKDIQKNKDGLKSYLTDQIGKKEIKILIPKIKINSLLKINGFPCHITGKMGEAFVLRPAVQFCCSNDEALYFKKIIRFNEIRKQREKMGKTISPYEDLSFRSYIKDNLCKKTKADEIEEKEFYDLLQKKNLEIYDMLLTKHKDTIYKKRPNSATIDILVKGKEKFKSLIIENQFEVILEILKLFSATRNVSDLQHIGGSKNAGNARVGNKISSLDNCILIYQSITGIFEKRIDLLKI

SEQ ID NO: 600 - protein, 1395 aa, Treponema denticola SP37
MKKEIKDYFLGLDVGTGSVGWAVTDTDYKLLKANRKDLWGMRCFETAETAEVRRLHRGARRRIERRKKRIKLLQELFSQEIAKTDEGFFQRMKESPFYAEDKTILQENALFNDRDFTDKTYHKAYPTINHLIKAWIENKVKPDPRLLYLACHNIIKKRGHFLFEGDFDSENQFDTSIQALFEYLREDMEVDIDADSQKVKEILKDSSLKNSEKQSRLNKMLGLKPSDKQKKAITNLISGNKINFADLYDNPDLKDAEKNSISFSKDDFDALSDDLASILGDSFELLLKAKAVYNCSVLSKVIGDEQYLSFAKVKIYEKHKTDLTKLKNVIKKHFPNDYKKVFGYNKNEKNNNNYSAYVGVCKTKSKKLVINNTVNQEDFYKFLKPILLAKSEIKEVNDILTEIETGTFLPKQISKSNAEIPYQLRKMELEKILSNAEKHFSFLKQKDEKGLSHSEKIIMLLTFKIPYYIGPINDNHKKSFPDRCWVIKKEKSPSGKTTPWNFFDHIDKDKTAEAFITSRTNFCTYLVGESVLPKNSLLYSEYTVLNEINNLQIIIDGKNICDIKLKQKIYEELFKKYKKITQKQISTFIKHEGICNKTDEVIILGIDKECTSSLKSYIELKNIFGKQVDEISTKNMLEEIIRWATIYDEGEGKTILKTKIKAEYGKYCSDEQIKKILNLKFSGWGRLSRKFLETVTSEMPGFSEPVNIITAMRETQNNLMELLSSEFKFTENIKKINSGFEDVEKQFSYDSLVKPLFLSPSVKKMLWQTLKLVKEISHITQAPPKKIFIEMAKGAELDPVRTKTRLKILQDLYNNCKNDADAFSSEIKDLSGKIENEDNLRLRSDKLYLYYTQLGKCMYCGKPIEIGHVFDTSNYDIDHIYPQSKIKDDSISNRVLVCSSCNKNKEDKYPLKAEIQSKQRGFWNFLQRNNFISLEKLNRLTRTSPISDDETAKFIARQLVETRQATKVAAKVLEKMFPETKIVYSKAETVSMFRNKFDIIKCREINDFHHAHDAYLNIVVGNVYNTKFTNNPWNFIKEKRDNPKIADTYNYYKVFDYDVKRNNITAWEKGKTIITVKDMLKRNTPIYTRQAACKKGELFNQTIMKKGLGQHPLKKEGPLSNISKYGGYNKVSAAYYTLIEYEEKGSKIRSLETIPLYLVKDIQKNKDGLKSYLTDQIGKKEIKILIPKIKINSLLKINGFPCHITGKMGEAFVLRPAVQFCCSNDEALYFKKIIRFNEIRKQREKMGKTISPYEDLSFRSYIKDNLCKKTKADEIEEKEFYDLLQKKNLEIYDMLLTKHKDTIYKKRPNSATIDILVKGKEKFKSLIIENQFEVILEILKLFSATRNVSDLQHIGGSKNAGNARVGNKISSLDNCILIYQSITGIFEKRIDLLKI

SEQ ID NO: 601 - protein, 1062 aa, Treponema sp. JC4
MIMKLEKWRLGLDLGTNSIGWSVFSLDKDNSVQDLIDMGVRIFSDGRDPKTKEPLAVARRTARSQRKLIYRRKLRRKQVFKFLQEQGLFPKTKEECMTLKSLNPYELRIKALDEKLEPYELGRALFNLAVRRGFKSNRKDGSREEVSEKKSPDEIKTQADMQTHLEKAIKENGCRTITEFLYKNQGENGGIRFAPGRMTYYPTRKMYEEEFNLIRSKQEKYYPQVDWDDIYKAIFYQRPLKPQQRGYCIYENDKERTFKAMPCSQKLRILQDIGNLAYYEGGSKKRVELNDNQDKVLYELLNSKDKVTFDQMRKALCLADSNSFNLEENRDFLIGNPTAVKMRSKNRFGKLWDEIPLEEQDLIIETIITADEDDAVYEVIKKYDLTQEQRDFIVKNTILQSGTSMLCKEVSEKLVKRLEEIADLKYHEAVESLGYKFADQTVEKYDLLPYYGKVLPGSTMEIDLSAPETNPEKHYGKISNPTVHVALNQTRVVVNALIKEYGKPSQIAIELSRDLKNNVEKKAEIARKQNQRAKENIAINDTISALYHTAFPGKSFYPNRNDRMKYRLWSELGLGNKCIYCGKGISGAELFTKEIEIEHILPFSRTLLDAESNLTVAHSSCNAFKAERSPFEAFGTNPSGYSWQEIIQRANQLKNTSKKNKFSPNAMDSFEKDSSFIARQLSDNQYIAKAALRYLKCLVENPSDVWTTNGSMTKLLRDKWEMDSILCRKFTEKEVALLGLKPEQIGNYKKNRFDHRHHAIDAVVIGLTDRSMVQKLATKNSHKGNRIEIPEFPILRSDLIEKVKNIVVSFKPDHGAEGKLSKETLLGKIKLHGKETFVCRENIVSLSEKNLDDIVDEKIKSKVKDYVAKHKGQKIEAVLSDFSKENGIKKVRCVNRVQTPIEITSGKISRYLSPEDYFAAVIWEIPGEKKTFKAQYIRRNEVEKNSKGLNVVKPAVLENGKPHPAAKQVCLLHKDDYLEFSDKGKMYFCRIAGYAATNNKLDIRPVYAVSYCADWINSTNETMLTGYWKPTPTQNWVSVNVLFDKQKARLVTVSPIGRVFRK

SEQ ID NO: 602 - protein, 1011 aa, uncultured delta proteobacterium HF0070_07E19
MSSKAIDSLEQLDLFKPQEYTLGLDLGIKSIGWAILSGERIANAGVYLFETAEELNSTGNKLISKAAERGRKRRIRRMLDRKARRGRHIRYLLEREGLPTDELEEVVVHQSNRTLWDVRAEAVERKLTKQELAAVLFHLVRHRGYFPNTKKLPPDDESDSADEEQGKINRATSRLREELKASDCKTIGQFLAQNRDRQRNREGDYSNLMARKLVFEEALQILAFQRKQGHELSKDFEKTYLDVLMGQRSGRSPKLGNCSLIPSELRAPSSAPSTEWFKFLQNLGNLQISNAYREEWSIDAPRRAQIIDACSQRSTSSYWQIRRDFQIPDEYRFNLVNYERRDPDVDLQEYLQQQERKTLANFRNWKQLEKIIGTGHPIQTLDEAARLITLIKDDEKLSDQLADLLPEASDKAITQLCELDFTTAAKISLEAMYRILPHMNQGMGFFDACQQESLPEIGVPPAGDRVPPFDEMYNPVVNRVLSQSRKLINAVIDEYGMPAKIRVELARDLGKGRELRERIKLDQLDKSKQNDQRAEDFRAEFQQAPRGDQSLRYRLWKEQNCTCPYSGRMIPVNSVLSEDTQIDHILPISQSFDNSLSNKVLCFTEENAQKSNRTPFEYLDAADFQRLEAISGNWPEAKRNKLLHKSFGKVAEEWKSRALNDTRYLTSALADHLRHHLPDSKIQTVNGRITGYLRKQWGLEKDRDKHTHHAVDAIVVACTTPAIVQQVTLYHQDIRRYKKLGEKRPTPWPETFRQDVLDVEEEIFITRQPKKVSGGIQTKDTLRKHRSKPDRQRVALTKVKLADLERLVEKDASNRNLYEHLKQCLEESGDQPTKAFKAPFYMPSGPEAKQRPILSKVTLLREKPEPPKQLTELSGGRRYDSMAQGRLDIYRYKPGGKRKDEYRVVLQRMIDLMRGEENVHVFQKGVPYDQGPEIEQNYTFLFSLYFDDLVEFQRSADSEVIRGYYRTFNIANGQLKISTYLEGRQDFDFFGANRLAHFAKVQVNLLGKVIK

SEQ ID NO: 603 - protein, 1032 aa, uncultured Termite group 1 bacterium phylotype Rs-D17
MLYHIANHRGTDSVRSFLEYDDDKIKENTLTAKIAKETKKVIDAKKYRTFGEYLYKGKIEKFQQNIRKKVSNRKTPANKNKEFAVTRDVIIKETEKILASQKQYYTYILTDEYIKKIKDAISYQTEKLIPESGYCPYFKDEKRLPRSHKLNEYRRMYEALNNAKYFDPVLDENTGEILSYQEKEFSREEKKILFDEVLLKGMELTESGAKKLLYHLPDGCEVQLQGRDKTTQKIKGYALVDLEASPFWLRLSQQQQDEFLYDWNSLPLEKLKPKLTNYYSLTESEVDETFQEIKLPSNYASVGKKAMEILLTYIKDGCSYTEALEKAVSEGKLKVDKQTMIYDSLPYYGKILKESTQKLIGKAFSKQFADRNYKEPDTNKNEREFGKIANPVVHQTLNELRKLINEIITVFGKKPLEIGLETTRELKKSKKNREYLSKQQNKNEYARNRIYKEYIEPHLSQIKSRQENPSKYISKFELLEEQNFICPFCSEKITPDDIINSKVDVEHIFPIEESEDITKNNLVIAHNECNADKGKKSPFDAFGDKTSGKYRWNCILHNAQKNLPHKVWRFYQGSLEKFLENKPMSRRFGTDNSYISKIAARYLACLFNDPYHSEIFCIKSSLIAQLRIAWDLNSIMVPLVKNILSEKELEEFKISKNKKIRIDNRHHALDAIVIAYANRGYHNFLNRIHAKEYKINYREKSWLSKILLPPLNRDLEDFKISVKDSIEKANVSIKHDHNTNGSLVKATAYKVYYSGAGEYIITTSKNVEEISFKEKEDPKDTLYRALCKFECRDIDIKDEKLIKKLKYNSTLYKKVQNNLSKAKQELEQDNKKTEEEGKKSQKITEVRIYKKACSLVKGQYIQCGSRLKDKFFAVKEPTEIKTGLGYDTGDNLFLDLYYDKTGKLCGEIIRKVNFNRNKPNYQKEGYTLFERIYQSDILEVDTSEDRISLKNKTGSAPSDRTFIKVNTFTEVNAYFDGKRDKIQIFFGNLLKSSFKNDSFFISSMQKYNVRKVILTSLGIIKYRSQILKNKEV

SEQ ID NO: 604 - protein, 1398 aa, Veillonella atypica ACS-134-V-Col7a
METQTSNQLITSHLKDYPKQDYFVGLDIGTNSVGWAVTNTSYELLKFHSHKMWGSRLFEEGESAVTRRGFRSMRRRLERRKLRLKLLEELFADAMAQVDSTFFIRLHESKYHYEDKTTGHSSKHILFIDEDYTDQDYFTEYPTIYHLRKDLMENGTDDIRKLFLAVHHILKYRGNFLYEGATFNSNAFTFEDVLKQALVNITFNCFDTNSAISSISNILMESGKTKSDKAKAIERLVDTYTVFDEVNTPDKPQKEQVKEDKKTLKAFANLVLGLSANLIDLFGSVEDIDDDLKKLQIVGDTYDEKRDELAKVWGDEIHIIDDCKSVYDAIILMSIKEPGLTISQSKVKAFDKHKEDLVILKSLLKLDRNVYNEMFKSDKKGLHNYVHYIKQGRTEETSCSREDFYKYTKKIVEGLADSKDKEYILNEIELQTLLPLQRIKDNGVIPYQLHLEELKVILDKCGPKFPFLHTVSDGFSVTEKLIKMLEFRIPYYVGPLNTHHNIDNGGFSWAVRKQAGRVTPWNFEEKIDREKSAAAFIKNLTNKCTYLFGEDVLPKSSLLYSEFMLLNELNNVRIDGKALAQGVKQHLIDSIFKQDHKKMTKNRIELFLKDNNYITKKHKPEITGLDGEIKNDLTSYRDMVRILGNNFDVSMAEDIITDITIFGESKKMLRQTLRNKFGSQLNDETIKKLSKLRYRDWGRLSKKLLKGIDGCDKAGNGAPKTIIELMRNDSYNLMEILGDKFSFMECIEEENAKLAQGQVVNPHDIIDELALSPAVKRAVWQALRIVDEVAHIKKALPSRIFVEVARTNKSEKKKKDSRQKRLSDLYSAIKKDDVLQSGLQDKEFGALKSGLANYDDAALRSKKLYLYYTQMGRCAYTGNIIDLNQLNTDNYDIDHIYPRSLTKDDSFDNLVLCERTANAKKSDIYPIDNRIQTKQKPFWAFLKHQGLISERKYERLTRIAPLTADDLSGFIARQLVETNQSVKATTTLLRRLYPDIDVVFVKAENVSDFRHNNNFIKVRSLNHHHHAKDAYLNIVVGNVYHEKFTRNFRLFFKKNGANRTYNLAKMFNYDVICTNAQDGKAWDVKTSMNTVKKMMASNDVRVTRRLLEQSGALADATIYKASVAAKAKDGAYIGMKTKYSVFADVTKYGGMTKIKNAYSIIVQYTGKKGEEIKEIVPLPIYLINRNATDIELIDYVKSVIPKAKDISIKYRKLCINQLVKVNGFYYYLGGKTNDKIYIDNAIELVVPHDIATYIKLLDKYDLLRKENKTLKASSITTSIYNINTSTVVSLSNKVGIDVFDYFMSKLRTPLYMKMKGNKVDELSSTGRSKFIKMTLEEQSIYLLEVLNLLTNSKTTFDVKPLGITGSRSTIGVKIHNLDEFKIINESITGLYSNEVTIV

SEQ ID NO: 605 - protein, 1398 aa, Veillonella parvula ATCC 17745
METQASNQLISSHLKGYPIKDYFVGLDIGTSSVGWAVTNKAYELLKFRSHKMWGSRLFDEGESAVARRGFRSMRRRLERRKLRLKLLEELFADAMAQVDPTFFMRLRESKYHYEDKTTGHSSKHILFIDKNYNDQDYFKEYPTVYHLRSELMKSGTDDIRKLFLAVHHILKYRGNFLYEGATFDSNASTLDDVIKQALENITFNCFDCNSAISSIGQILMEAGKTKSDKAKAIEHLVDTYIATDTVDTSSKTQKDQVKEDKKRLKAFANLVLGLNASLIDLFGSVEELEEDLKKLQITGDTYDDKRDELAKAWSDEIYIIDDCKSVYDAIILLSIKEPGLTISESKVKAFNKHKDDLAILKSLLKSDRSIYNTMFKVDEKGLHNYVHYIKQGRTEETSCNREDFYKYTKKIVEGLSDSKDKEYILSQIELQILLPLQRIKDNGVIPYQLHLEELKAILAKCGPKFPFLNEVADGFSVAEKLIKMLEFRIPYYVGPLNTHHNVDNGGFAWAVRKASGRVTPWNFDDKIDREKSAAAFIKNLTNKCTYLLGEDVLPKSSLLYSEFMLLNELNNVRIDGKPLEKVVKEHLIEAVFKQDHKKMTKNRIEQFLKDNGYISETHKHEITGLDGEIKNDLASYRDMVRILGDGFDRSMAEEIITDITIFGESKKMLRETLRKKFASCLDDEAIKKLTKLRYRDWGRLSQKLLNGIEGCDKAGDGTPETIIILMRNFSYNLMELLGDKFSFMERIQEINAKLTEGQIVNPHDIIDDLALSPAVKRAVWQALRIVDEVAHIKKALPARIFVEVTRSNKNEKKKKDSRQKRLSDLYAAIKKDDVLLNGLNNEIFGELKSSLAKYDDAALRSKKLYLYYTQMGRCAYTGEIIELSLLNTDNYDIDHIYPRSLTKDDSFDNLVLCKRTANAQKSDAYPISEEIQKTQKPFWTFLKQQGLISERKYERLTRITPLTADDLSGFIARQLVETNQSVKAATTLLRRLYPGVDVVFVKAENVTDFRHDNNFIKVRSLNHHHHAKDAYLNIVVGNVYHERFTRNFRAFFKKNGANRTYNLAKMFNYDVNCTNAKDGKAWDVKTSMDTVKKMMDSNDVRVTKRLLEQTGALADATIYKATVAGKAKDGAYIGMKTKSSVFADVSKYGGMTKIKNAYSIIVQYTGKKGEVIKEIVPLPIYLTNRNTTDQDLINYVASIIPQAKDISIIYGKLCINQLVKVNGFYYYLGGKTNSKFCIDNAIQVIVSNEWIPYLKVLEKFNNMRKDNKDLKANVVSTRALDNKHTIEVRIVEEKNIEFFDYLVSKLKMPIYQKMKGNKAAELSEKGYGLFKKMSLEEQSIHLIELLNLLTNQKTTFEVKPLGITASRSTVGSKISNQDEFKVINESITGLYSNEVTIV

SEQ ID NO: 606 - protein, 1395 aa, Veillonella sp. 6_1_27
METQASNQLISSHLKGYPIKDYFVGLDIGTSSVGWAVTNKAYELLKFRSHKMWGSRLFDEGESAVARRGFRSMRRRLERRKLRLKLLEELFADAMAQVDPTFFMRLRESKYHYEDKTTGHSSKHILFIDKNYTDQDYYKEYPTIYHLRVALMKSGTDDIRKLFLAVHHILKYRGNFLYEGATFDSNASTLDDVLKQALENITFNCFDSSAAIGSIGQILMELGKTKSDKAKAIERLVDTYIITDEVDTSGKTQKEQVKEDKKRLKSFANLVLGLSASLTDLFGSVEDLDEDLKKLQIIGDTYDERRDDLAKVWGDEIHIIDDCKSVYDAIILMSIKEPGLTISESKVKAFKKHKDDLAILKSLLKSDRSIYNTMFKVDEKGLHNYVHYIKQGRTEETSCNREDFYKYTKKVVEGLPDSKDKEYILSEIELQTLLPLQRIKDNGVIPYQLHLEELKVILAKCGPKFPFLNEVADGFSVAEKLIKMLEFRIPYYVGPLNTHHNVDNGGFAWAVRKASGRVTPWNFDDKIDREKSAAAFIKNLTNKCTYLLGEDVLPKSSLLYSEFMLLNELNNVRIDGKPLEKAVKEHLIEAVFKQDHKKMTKNRIEQFLKDNNYIPEKHKPEITGLDGEIKNDLASYRDMVRILGNNFDLSMAEEIITDITIFGESKKMLRETLRNKFSSRLDDEAIKKLSKLRYRDWGRLSRKLLNVIEGCDKAGDGTPETIIILMRNFSYNLMELLGDKFSFMERIQEINAKLIEGQIVNPHDIIDDLALSPAVKRAVWQALRIVDEIVHIKKTLPARIFVEVTRSNKAEKKKKDSRQKRLSDLYAAIKKDDALLSGLTNEEFGGLKSGLAKYDDAALRSKKLYLYYTQMGRCAYTGEVIDLSQLNTDNYDIDHIYPRSLTKDDSFDNLVLCKRTANAQKSDTYPISKEIQKAQKAFWIFLKQQGLISERKYERLTRITPLTADDLSGFIARQLVETNQSVKAATTLLRRLYPGVDVVFVKAENVTDFRHDNDFIKVRSLNHHHHAKDAYLNIVVGNVYHERFTRNFRAFFKKNGANRTYNLAKMFNYDVKCTNAKDGKAWAVKTSMDTVKKMMDSNDVRVTKRVYEQKGQLSDINLTKASKVKADIYLPIKANDPIMSQNMKYGGYSDIKNAYYTIIEYSDKKNNSIKAFIPIPIFIATKTLTKQALLEYIKTVLPKANNLRIIYKKVYNDQLLKIDGFNYYLGGRSNDRFCIDNAIQLIVPLEIQFYIKLVEKFTAIISENKNIALKASSVKSRNPINNQVENITLEYTQKLFDYLVSKFNELIYLKMRGNKLTDVNNIGRKQFIKLSLEERCKALAELLNIFTNMNKKLSLSTINVSASRKVVNFKISSLDEFKIVNESITGLYSHEITIV

SEQ ID NO: 607 - protein, 1120 aa, Veillonella sp. oral taxon 780 str. F0422
MGFKANLVNLFTDEDIEVILPEEKEFKSINLHEGIYEDVRDAYEDAWGDRFAIVDQCKVLHDIIVISSIIKPGQSLSEAKIESYNQHKEDLVLLKSVLKEDRKLYDDMFVVDTDKGTNYVKYTKQGVNGNTSATQEEFYKYVRKVVSVLPETEHTRRIVQKLEEGTFLPLQRISKNGVVPYQLHKEELVRILDKATVNFPFLNKVENGLTVADKIISILEFKIPYYVGPLNPTHSIENGGFAWVVRKEAGQVLPWNFEQKVDVQASAVKFIENLTNKCTYLIDQDVLPKYSLLYAEFSLLNELNNIRVNDKPLPADVKQAFIRDHFISLQDSKTATKKVVAKYLVDNNYVSQPPIITGMDQQIATKLTSHRDMTRILGEHFDHAMAEDIIRYITIFGESKDMLRQVLKNYYGDRLTTEQIKKLGKLTYTGWGRLSKKFLSDIWGMKKNDDDAEAGTIIEHMREGQENLMQLLSSSYSFIDVVQEYVTNVLGEKEKTAFEMLEDLSLSPMVKRSVWQTLRILDEIVSIRKELPKKIFVEVARTNKADKKRTQSRKALLEELYKQIKDEDVHVLQQELESKEDSALNSKKLYLYFTQMGRCMYSGRRIDIHELFTDKYDIDHIYPRSLTKDDSWHNIVLVEKQLNAEKTDRFPILSAIQSKQKGFWKLLWDRGFISEKKYDRLVRTTDLTDEELNQFINRQMVSTNQSVKAVTTLLHQLYPETEVVFSKAENVSDFRHDYDFVKVRSINHHHHAKDAYLNIVVGNVYHEKFTKNFLSFAKQKGTRRTYNLTKIFEYEIKLTEESKKVIWDPNIHMDIVKKMMKSNDVRVTQRAVPQKGGLSDETIYKKGIAKRGVYLPLKSSDERVRDVEKYGGRTSITISEYIILNIRDTSDQDRIEIFSLPLYIAGKKDIHKAIEEAYLSTCKKPASVVDIQILYRGLYIGSKVNINGFTYYMGGKTGSNVSIDSAVDVVMDITSSVYIKLLEKVAIKKIENPKTFRIENIKTSYNHKEVTVSKEQNIALYQELLKKLDTPLFSKMKGNKLEEFRTVGFDTFIALSLEEQASVLLEVLNVLTNFKTKRDITKIGMTSSRSTLGINISNTEQFSVITTSITGLYEQEIKIK

SEQ ID NO: 608 - protein, 1068 aa, Verminephrobacter eiseniae
MNKAVAYRLALDLGSTSLGWAIFRLNEAREPTAIIRAGVRIFSDGRNANSEPLAVHRRVARAMRRRRDRLLKRKKRMHDQLVQHGFFPAEVAERKELERLNPYQLRAKGLHEALTPGEFARALFHINQRRGFKSNRKTDRKDNDSGALKQAISELRKRIQDSDCATAGEWFWKERMQQKPEGVRGQWVRARYRKTPSTTDEGKKRIGYDLYVDRAMVEQEFDALWAAQAALQPGLFTEAARAELKDTLLYQRDLRPVKPGRCTLLPAEERAPLALPSTQRFRILQEVNNLRLLDEALREVPLNLAQRDAVVSALEGKKELSFAAIRKLLTLSGKFNLEDEKRAELKGNATSVILARKDLFGDAWAGFDAAVQDEIVWRLVSQESEGALIAWLQQHTGVDGVCAEAIVNTRLPDGYGRLSRKALERIVPALQREVCTYDKAVQAAGFAHHSDLGFDFDYAEDEVQQVGEHTIASTGEVQAQYAFKQLPYYGKALQRHVAFGSGDAKDHEEKCYGKIANPTVHIGLNQVRTVVNALIRRYGHPTEVVVELARDLKQSREQKQQTQREQADNQKRNEDIRKRIAPILETSPERVRDRDIKKWILWEELNKKDIADRHCPYSGERISATMLLSEAVEIEHILPFSRTLDDSLNNRTVAMRRANRIKGDRTPWEARADFEAQGWRYEAILQRAEGMPPRKRYRFAEDGYQRWLGKDRNFLARALNDTSYLSRLAANYLRLVCPQGVRVIPGQMTDKLRGKFGLNSVLGLDGKKNRNDHRHHAVDACVIGVTDQGLMQRFANASKQARENGLTRLVQDMLLPWWPSYYDHVERAVRHIRVSHRPDHGFEGAMMKGTAHGIREDGIREDGRIKQRPKAKGSADHKTITLIPIDEPRQLARHGVDAEGKPLPYKGYASGSNYCIEITKNGKGKWEGQVISTFDAYRIKAAADAAARAGQVISTVEADSIVRKSGWERLRGAQSQNGQPLVMRLVIGDSVRMEVDGRDEVMRVVKMSGKEMVFAPVREANVDKRNNMPDEQDPFTYTYKRADQLRKAKARQVTISPIGELRDPGFKG

SEQ ID NO: 609 - protein, 1440 aa, Weeksella virosa
MKTILGLDLGTNSIGWALVEQDFENKQGLILGMGSRIIPMDAGIIGKFAEGSSISQTAERTGYRSIRRLRERHLLRRERLHRVLNILKFLPEHYAAEIDFEKRFGQFLAETEPKLAWKKNAEGKFEFLFQRSFDEMVADFKANGQDIKIPYDWTIYYLRKKALTQKISPQELAWIILNFNQKRGYYQLRGEEEEENPNKKVEFYSLKIVDVVADEQPNKKGDTWYSLHLENGWVYRRSSKIPLYDWKDKVRDFIVTTDINEDGSEKLDKDGEVKRSFRAPKEDDWTLIKKKTEQEIEQFNQTVGSYIYEALLDNPTQKIRGKLVRTIERKFYKSELKKILEKQIELQPELFTEDLYNACARELYRRNVAHQQQLSSRDFVYLFLNDIIFYQRPLRSQKSLISNCSLEFRTIKDKDGNGQIIYLKAIPKSNPYYQEFRVWQWLYNLKIFTKEDDKDVTNQFINKVEDLEALFEFLMNQKEVNHTDILTYLIEPIVKSKYPNAKGKAFKDELKKELKKYRWNYVYDADKDESKSYPMNETRYELRKRLDKVENVPADFMTRKIEQHLWHIIYSVTDKIEFEKALKSFANKYDLHQESFVENFKRFKPFDSDYGTYSEKAIKKLLPLMRVGKYWSWDIIDDKTKTRIGKIITGEYDETIKNRVREKAIDLTEENHFQGLQLWLAQYIVYDRHSEADIAGKWNSVADLEQYLSEFKQHSLRNPIVEQVITETLRVVRDIWKQYGKGAKDYFDEIHIELGREMKNTAEERKRLSSIISENETTNLRIRAILEELMYDENMENVRPYSPMQQEALKIYEDGVLSSSVEIPEDIEKISKKSEPTKSEIQRYKLWLEQKYRSPYTGRPIPLSKLFTPAYQIEHIIPQARFFDDGFSNKVICESEVNALKDKMLGLEFIQNYYGQKVTTSFGEVTILTEDAYKAFVKEHYDKNRSKRNKLLLEEIPEKMIDRQMNDTRYISKYISKVLSNLVRGEKDDEGVNSKNIIPGNGKITGILKQDWGLNDVWNDLILPRFERMNQLTNSTDFTAWNEKHQKFLPSVPLELSKGFQKKRIDHRHHALDALIIACATRDHVNLLNNKHAKSRNERYDLQHKLRHTTPWQDKEGKVRTKFTEFKKPWETFTQDTKKELEKIVVNFKQNLRVINKATNYYEKIVDGKKVMFKQEGVNWAIRKPMHKETVSGKIDLPRVKVSKGKILTATRKSLDTSFNAKTILSITDTGIQKILLNYLKAKGNPELAFSPEGIEEMNQNISLYNDGKPHQPILKVRVFEQGSKFPLGETGNKTTKYVEAAKGTNLFFGVYEDNQGKRSYDTIPLNIVIERQKQGLNSVPETNEKGHRLLFSLSPNDLVYVPIEGEVFDETNPDVNRIYKVVSFSGSQMFCVRQDVATSIVYKLEFSSLNKMERTIDGIMIKEICIKLKVDRLGNISKA

SEQ ID NO: 610 - protein, 1409 aa, Wolinella succinogenes
MLVSPISVDLGGKNTGFFSFTDSLDNSQSGTVIYDESFVLSQVGRRSKRHSKRNNLRNKLVKRLFLLILQEHHGLSIDVLPDEIRGLFNKRGYTYAGFELDEKKKDALESDTLKEFLSEKLQSIDRDSDVEDFLNQIASNAESFKDYKKGFEAVFASATHSPNKKLELKDELKSEYGENAKELLAGLRVTKEILDEFDKQENQGNLPRAKYFEELGEYIATNEKVKSFFDSNSLKLTDMTKLIGNISNYQLKELRRYFNDKEMEKGDIWIPNKLHKITERFVRSWHPKNDADRQRRAELMKDLKSKEIMELLTTTEPVMTIPPYDDMNNRGAVKCQTLRLNEEYLDKHLPNWRDIAKRLNHGKFNDDLADSTVKGYSEDSTLLHRLLDTSKEIDIYELRGKKPNELLVKTLGQSDANRLYGFAQNYYELIRQKVRAGIWVPVKNKDDSLNLEDNSNMLKRCNHNPPHKKNQIHNLVAGILGVKLDEAKFAEFEKELWSAKVGNKKLSAYCKNIEELRKTHGNTFKIDIEELRKKDPAELSKEEKAKLRLTDDVILNEWSQKIANFFDIDDKHRQRFNNLFSMAQLHTVIDTPRSGFSSTCKRCTAENRFRSETAFYNDETGEFHKKATATCQRLPADTQRPFSGKIERYIDKLGYELAKIKAKELEGMEAKEIKVPIILEQNAFEYEESLRKSKTGSNDRVINSKKDRDGKKLAKAKENAEDRLKDKDKRIKAFSSGICPYCGDTIGDDGEIDHILPRSHTLKIYGTVFNPEGNLIYVHQKCNQAKADSIYKLSDIKAGVSAQWIEEQVANIKGYKTFSVLSAEQQKAFRYALFLQNDNEAYKKVVDWLRTDQSARVNGTQKYLAKKIQEKLTKMLPNKHLSFEFILADATEVSELRRQYARQNPLLAKAEKQAPSSHAIDAVMAFVARYQKVFKDGTPPNADEVAKLAMLDSWNPASNEPLTKGLSTNQKIEKMIKSGDYGQKNMREVFGKSIFGENAIGERYKPIVVQEGGYYIGYPATVKKGYELKNCKVVTSKNDIAKLEKIIKNQDLISLKENQYIKIFSINKQTISELSNRYFNMNYKNLVERDKEIVGLLEFIVENCRYYTKKVDVKFAPKYIHETKYPFYDDWRRFDEAWRYLQENQNKTSSKDRFVIDKSSLNEYYQPDKNEYKLDVDTQPIWDDFCRWYFLDRYKTANDKKSIRIKARKTFSLLAESGVQGKVFRAKRKIPTGYAYQALPMDNNVIAGDYANILLEANSKTLSLVPKSGISIEKQLDKKLDVIKKTDVRGLAIDNNSFFNADFDTHGIRLIVENTSVKVGNFPISAIDKSAKRMIFRALFEKEKGKRKKKTTISFKESGPVQDYLKVFLKKIVKIQLRTDGSISNIVVRKNAADFTLSFRSEHIQKLLK

SEQ ID NO: 611 - protein, 1059 aa, Wolinella succinogenes
MIERILGVDLGISSLGWAIVEYDKDDEAANRIIDCGVRLFTAAETPKKKESPNKARREARGIRRVLNRRRVRMNMIKKLFLRAGLIQDVDLDGEGGMFYSKANRADVWELRHDGLYRLLKGDELARVLIHIAKHRGYKFIGDDEADEESGKVKKAGVVLRQNFEAAGCRTVGEWLWRERGANGKKRNKHGDYEISIHRDLLVEEVEAIFVAQQEMRSTIATDALKAAYREIAFFVRPMQRIEKMVGHCTYFPEERRAPKSAPTAEKFIAISKFFSTVIIDNEGWEQKIIERKTLEELLDFAVSREKVEFRHLRKFLDLSDNEIFKGLHYKGKPKTAKKREATLFDPNEPTELEFDKVEAEKKAWISLRGAAKLREALGNEFYGRFVALGKHADEATKILTYYKDEGQKRRELTKLPLEAEMVERLVKIGFSDFLKLSLKAIRDILPAMESGARYDEAVLMLGVPHKEKSAILPPLNKTDIDILNPTVIRAFAQFRKVANALVRKYGAFDRVHFELAREINTKGEIEDIKESQRKNEKERKEAADWIAETSFQVPLTRKNILKKRLYIQQDGRCAYTGDVIELERLFDEGYCEIDHILPRSRSADDSFANKVLCLARANQQKTDRTPYEWFGHDAARWNAFETRTSAPSNRVRTGKGKIDRLLKKNFDENSEMAFKDRNLNDTRYMARAIKTYCEQYWVFKNSHTKAPVQVRSGKLTSVLRYQWGLESKDRESHTHHAVDAIIIAFSTQGMVQKLSEYYRFKETHREKERPKLAVPLANFRDAVEEATRIENTETVKEGVEVKRLLISRPPRARVTGQAHEQTAKPYPRIKQVKNKKKWRLAPIDEEKFESFKADRVASANQKNFYETSTIPRVDVYHKKGKFHLVPIYLHEMVLNELPNLSLGTNPEAMDENFFKFSIFKDDLISIQTQGTPKKPAKIIMGYFKNMHGANMVLSSINNSPCEGFTCTPVSMDKKHKDKCKLCPEENRIAGRCLQGFLDYWSQEGLRPPRKEFECDQGVKFALDVKKYQIDPLGYYYEVKQEKRLGTIPQMRSAKKLVKK

SEQ ID NO: 612 - protein, 1388 aa, Zunongwangia profunda
MKRILGLDLGTNSIGWALVNEAENEKEISKIIKLGVRVNPLTIDEKTNFEKGRPLSTNADRTLKRGARRNLQRYKLRRENLIEILIDNHIITKETPLTEIGKGTTYQTLSLRAKAVRERIDLEDFAKVLLAINKKRGYKSSRKASNDEEGQAIDGMAIAKELYERGITPGQYVLELLENDRKYIPDFYRSDLKQEFNKIWNNQKTFYPEILTDELFKELDGKNKSQTWAICQKPFNIKGIKRITKGREKTIENYHWRVKGLSGKLNLEKLAIILQEINNDINQSSGYLGGISDKSKKLYLNKETVGEFLYKQIAKNPHTSLKNQVFYRHDYLDEFEQIWKTQSNFNANLTDELKQEIRDVIIFYQRKIKSQKSLISFCQFESWEQEYFDKETGKTKTRTVGRRVIPKSSPLFQEFKIWQNLNHLVFTNSETDEKIEIKEVEQEIRKELFEELNLRGDLNPNDLLKILRSQFKIGKLSNWKCNFEKIEGNRTNAALFNIYQKISDFEGYGIDWNKSNAKKIRKELKATFPEIGIDASILEFDAYKKQLTNQSSYELWHLLYSAEEDFKISEQDKLIYGNSSVSLKKKLHLKFGFNPEYAKMLANLSLMSDYGNLSAKAIKKILPYLEDGHLYSEACRLAGYNHSKSLTAEELEKFEPKAKLDLLKKNSLRNPVVEKILNQMVNVVNQVIDTYGKPDGVRIELARELKKSAKERAEMTKGIADGTRRNEEIKKIITQKFGIPNPTKSDLVRYRLWQELESRGYKDIFTDKYISPDKIFSSEIDIEHIIPKALLFDDSFSNKTLSFRNVNLKKANRTALDFITQDYQSNVEAYKERVETWNKDNHISKGKRNKLLMSLKDIPDGFIERDLRNSQYIARKAKRMLYEVFPNEVLATSGSITDKLRSDWDLINVMKELNLPKYKALGLTEYEERLDKGTEELFKHEVIKDWTKRNDHRHHAMDALAVAFTTHNHIQYINNLNARKDITQDNHPIIKNIENLITEVNSKGKRVFKAPMSSFRESAKEQIEAILVSFKNKNKVVTKNINQTKKEGGFNYQNAKTPRGQLHKETIYGKSKQPLEKPVKINNRFCKKQVGLIINFKEQEAVLHHLKKYDNNEKIAFSNKTLKSDPIQVNGSPLREVKIFEEIFTIRKDINPDNFKTQKHLDKIIDKGIKEVMKKRLEEYNGDFKTAFSDLDKNPIWLNQSKGITIKRATISGVTNAEPLHQAKDHLGNIILDDNGKEIPIDYVSTGNNHHVAIYQDESGNLQEEVVSFYEAVIRKNQDQPIIKKRHPKGWKFLFTMKQNEMFVFSSENFNPSEIDLLDEKNAAIISPNLFRVQKIATKNYMFRHHLETEVTNNLDFTYRHFQATEWLRNLCKVRIDHIGRIVQIGEY

SEQ ID NO: 613 - RNA, 22 nt, Homo sapiens
ugcucagguugcacagcuggga

SEQ ID NO: 614 - RNA, 22 nt, Homo sapiens
ucccagcugugcaaccugagca

SEQ ID NO: 615 - RNA, 22 nt, Homo sapiens
ucagguguggaaacugaggcag

SEQ ID NO: 616 - RNA, 22 nt, Homo sapiens
cugccucaguuuccacaccuga

SEQ ID NO: 617 - RNA, 22 nt, Homo sapiens
caaaaccgcgauuacucuugca

SEQ ID NO: 618 - RNA, 22 nt, Homo sapiens
ugcaagaguaaucgcgguuuug

SEQ ID NO: 619 - RNA, 21 nt, Homo sapiens
aaaaguaauugugguuuuugc

SEQ ID NO: 620 - RNA, 21 nt, Homo sapiens
gcaaaaaccacaauuacuuuu

SEQ ID NO: 621 - RNA, 21 nt, Homo sapiens
aaaaacugcaaucacuuuugc

SEQ ID NO: 622 - RNA, 21 nt, Homo sapiens
gcaaaagugauugcaguuuuu

SEQ ID NO: 623 - RNA, 22 nt, Homo sapiens
caaaagugauugugguuuuugc

SEQ ID NO: 624 - RNA, 22 nt, Homo sapiens
gcaaaaaccacaaucacuuuug

SEQ ID NO: 625 - RNA, 22 nt, Homo sapiens
agcaguguuuguuuugcccaca

SEQ ID NO: 626 - RNA, 22 nt, Homo sapiens
ugugggcaaaacaaacacugcu

SEQ ID NO: 627 - RNA, 22 nt, Homo sapiens
ucgggcgcaagagcacugcagu

SEQ ID NO: 628 - RNA, 22 nt, Homo sapiens
acugcagugcucuugcgcccga

SEQ ID NO: 629 - RNA, 21 nt, Homo sapiens
acacuuguugggaugaccugc

SEQ ID NO: 630 - RNA, 21 nt, Homo sapiens
gcaggucaucccaacaagugu

SEQ ID NO: 631 - RNA, 24 nt, Homo sapiens
aggagcuauccacuccaggugucc

SEQ ID NO: 632 - RNA, 24 nt, Homo sapiens
ggacaccuggaguggauagcuccu

SEQ ID NO: 633 - RNA, 23 nt, Homo sapiens
ccagagcagccugcgguaacagu

SEQ ID NO: 634 - RNA, 23 nt, Homo sapiens
acuguuaccgcaggcugcucugg

SEQ ID NO: 635 - RNA, 22 nt, Homo sapiens
aguugccagggcugccuuuggu

SEQ ID NO: 636 - RNA, 22 nt, Homo sapiens
accaaaggcagcccuggcaacu

SEQ ID NO: 637 - RNA, 21 nt, Homo sapiens
uagaccaucuuucuagaguau

SEQ ID NO: 638 - RNA, 21 nt, Homo sapiens
auacucuagaaagauggucua

SEQ ID NO: 639 - RNA, 22 nt, Homo sapiens
agcucuagaaagauuguugacc

SEQ ID NO: 640 - RNA, 22 nt, Homo sapiens
ggucaacaaucuuucuagagcu

SEQ ID NO: 641 - RNA, 21 nt, Homo sapiens
gggacuaggaugcagaccucc

SEQ ID NO: 642 - RNA, 21 nt, Homo sapiens
ggaggucugcauccuaguccc

SEQ ID NO: 643 - RNA, 23 nt, Homo sapiens
aggucugcauucaaauccccaga

SEQ ID NO: 644 - RNA, 23 nt, Homo sapiens
ucuggggauuugaaugcagaccu

SEQ ID NO: 645 - RNA, 20 nt, Homo sapiens
cauuacagcacagccauucu

SEQ ID NO: 646 - RNA, 20 nt, Homo sapiens
agaauggcugugcuguaaug

SEQ ID NO: 647 - RNA, 21 nt, Homo sapiens
ucuggcugugcuguaaugcag

SEQ ID NO: 648 - RNA, 21 nt, Homo sapiens
cugcauuacagcacagccaga

SEQ ID NO: 649 - RNA, 21 nt, Homo sapiens
ugacuucuaccucuuccaaag

SEQ ID NO: 650 - RNA, 21 nt, Homo sapiens
cuuuggaagagguagaaguca

SEQ ID NO: 651 - RNA, 22 nt, Homo sapiens
uuggaauaggggauaucucagc

SEQ ID NO: 652 - RNA, 22 nt, Homo sapiens
gcugagauauccccuauuccaa

SEQ ID NO: 653 - RNA, 22 nt, Homo sapiens
ucguaucagagauuccagacac

SEQ ID NO: 654 - RNA, 22 nt, Homo sapiens
gugucuggaaucucugauacga

SEQ ID NO: 655 - RNA, 23 nt, Homo sapiens
acugggaugucacugaauauggu

SEQ ID NO: 656 - RNA, 23 nt, Homo sapiens
accauauucagugacaucccagu

SEQ ID NO: 657 - RNA, 22 nt, Homo sapiens
caaaguccuuccuauuuuuccc

SEQ ID NO: 658 - RNA, 22 nt, Homo sapiens
gggaaaaauaggaaggacuuug

SEQ ID NO: 659 - RNA, 21 nt, Homo sapiens
gaagaauaggagggacuuugu

SEQ ID NO: 660 - RNA, 21 nt, Homo sapiens
acaaagucccuccuauucuuc

SEQ ID NO: 661 - RNA, 22 nt, Homo sapiens
ugggccaugcauuucuagaacu

SEQ ID NO: 662 - RNA, 22 nt, Homo sapiens
aguucuagaaaugcauggccca

SEQ ID NO: 663 - RNA, 21 nt, Homo sapiens
ucuagaaaugcaugacccacc

SEQ ID NO: 664 - RNA, 21 nt, Homo sapiens
ggugggucaugcauuucuaga

SEQ ID NO: 665 - RNA, 22 nt, Homo sapiens
uuccacugccacuaccuaauuu

SEQ ID NO: 666 - RNA, 22 nt, Homo sapiens
aaauuagguaguggcaguggaa

SEQ ID NO: 667 - RNA, 21 nt, Homo sapiens
auuagguaguggcaguggaac

SEQ ID NO: 668 - RNA, 21 nt, Homo sapiens
guuccacugccacuaccuaau

SEQ ID NO: 669 - RNA, 21 nt, Homo sapiens
caccgacucugucuccugcag

SEQ ID NO: 670 - RNA, 21 nt, Homo sapiens
cugcaggagacagagucggug

SEQ ID NO: 671 - RNA, 22 nt, Homo sapiens
cagcaggggagagagaggaguc

SEQ ID NO: 672 - RNA, 22 nt, Homo sapiens
gacuccucucucuccccugcug

SEQ ID NO: 673 - RNA, 22 nt, Homo sapiens
uuccagcccuucuaaugguagg

SEQ ID NO: 674 - RNA, 22 nt, Homo sapiens
ccuaccauuagaagggcuggaa

SEQ ID NO: 675 - RNA, 22 nt, Homo sapiens
uaccauuagaagagcuggaaga

SEQ ID NO: 676 - RNA, 22 nt, Homo sapiens
ucuuccagcucuucuaauggua

SEQ ID NO: 677 - RNA, 21 nt, Homo sapiens
ucaagugucaucugucccuag

SEQ ID NO: 678 - RNA, 21 nt, Homo sapiens
cuagggacagaugacacuuga

SEQ ID NO: 679 - RNA, 23 nt, Homo sapiens
uuugggauugacgccacaugucu

SEQ ID NO: 680 - RNA, 23 nt, Homo sapiens
agacauguggcgucaaucccaaa

SEQ ID NO: 681 - RNA, 21 nt, Homo sapiens
cugccuguucuuccacuccag

SEQ ID NO: 682 - RNA, 21 nt, Homo sapiens
cuggaguggaagaacaggcag

SEQ ID NO: 683 - RNA, 23 nt, Homo sapiens
uauggaguggacuuucagcuggc

SEQ ID NO: 684 - RNA, 23 nt, Homo sapiens
gccagcugaaaguccacuccaua

SEQ ID NO: 685 - RNA, 22 nt, Homo sapiens
ccucaccaucccuucugccugc

SEQ ID NO: 686 - RNA, 22 nt, Homo sapiens
gcaggcagaagggauggugagg

SEQ ID NO: 687 - RNA, 23 nt, Homo sapiens
caggcagaaguggggcugacagg

SEQ ID NO: 688 - RNA, 23 nt, Homo sapiens
ccugucagccccacuucugccug

SEQ ID NO: 689 - RNA, 20 nt, Homo sapiens
ucucuucaucuaccccccag

SEQ ID NO: 690 - RNA, 20 nt, Homo sapiens
cugggggguagaugaagaga

SEQ ID NO: 691 - RNA, 21 nt, Homo sapiens
uuggaggguguggaagacauc

SEQ ID NO: 692 - RNA, 21 nt, Homo sapiens
gaugucuuccacacccuccaa

SEQ ID NO: 693 - RNA, 22 nt, Homo sapiens
cugccagccccguuccagggca

SEQ ID NO: 694 - RNA, 22 nt, Homo sapiens
ugcccuggaacggggcuggcag

SEQ ID NO: 695 - RNA, 23 nt, Homo sapiens
acaaaguacagcauuagccuuag

SEQ ID NO: 696 - RNA, 23 nt, Homo sapiens
cuaaggcuaaugcuguacuuugu

SEQ ID NO: 697 - RNA, 23 nt, Homo sapiens
aaaggucauuguaagguuaaugc

SEQ ID NO: 698 - RNA, 23 nt, Homo sapiens
gcauuaaccuuacaaugaccuuu

SEQ ID NO: 699 - RNA, 22 nt, Homo sapiens
ugaggcuaaugcacuacuucac

SEQ ID NO: 700 - RNA, 22 nt, Homo sapiens
gugaaguagugcauuagccuca

SEQ ID NO: 701 - RNA, 24 nt, Homo sapiens
uauagagagcaggaagauuaaugu

SEQ ID NO: 702 - RNA, 24 nt, Homo sapiens
acauuaaucuuccugcucucuaua

SEQ ID NO: 703 - RNA, 23 nt, Homo sapiens
gugcuucaucguaauuaaccuua

SEQ ID NO: 704 - RNA, 23 nt, Homo sapiens
uaagguuaauuacgaugaagcac

SEQ ID NO: 705 - RNA, 24 nt, Homo sapiens
guggaaagcaugcauccagggugu

SEQ ID NO: 706 - RNA, 24 nt, Homo sapiens
acacccuggaugcaugcuuuccac

SEQ ID NO: 707 - RNA, 22 nt, Homo sapiens
agacacauuuggagagggaacc

SEQ ID NO: 708 - RNA, 22 nt, Homo sapiens
gguucccucuccaaaugugucu

SEQ ID NO: 709 - RNA, 22 nt, Homo sapiens
uucccuuugucauccuaugccu

SEQ ID NO: 710 - RNA, 22 nt, Homo sapiens
aggcauaggaugacaaagggaa

SEQ ID NO: 711 - RNA, 21 nt, Homo sapiens
gcugggaaggcaaagggacgu

SEQ ID NO: 712 - RNA, 21 nt, Homo sapiens
acgucccuuugccuucccagc

SEQ ID NO: 713 - RNA, 21 nt, Homo sapiens
uaccacaggguagaaccacgg

SEQ ID NO: 714 - RNA, 21 nt, Homo sapiens
ccgugguucuacccuguggua

SEQ ID NO: 715 - RNA, 22 nt, Homo sapiens
ggcuggagcgagugcaguggug

SEQ ID NO: 716 - RNA, 22 nt, Homo sapiens
caccacugcacucgcuccagcc

SEQ ID NO: 717 - RNA, 18 nt, Homo sapiens
ccaggcucugcaguggga

SEQ ID NO: 718 - RNA, 18 nt, Homo sapiens
ucccacugcagagccugg

SEQ ID NO: 719 - RNA, 22 nt, Homo sapiens
cugggaggugugauauuguggu

SEQ ID NO: 720 - RNA, 22 nt, Homo sapiens
accacaauaucacaccucccag

SEQ ID NO: 721 - RNA, 22 nt, Homo sapiens
gggaggugugaucucacacucg

SEQ ID NO: 722 - RNA, 22 nt, Homo sapiens
cgagugugagaucacaccuccc

SEQ ID NO: 723 - RNA, 22 nt, Homo sapiens
ugugauaucaugguuccuggga

SEQ ID NO: 724 - RNA, 22 nt, Homo sapiens
ucccaggaaccaugauaucaca

SEQ ID NO: 725 - RNA, 22 nt, Homo sapiens
ugugauaucgugcuuccuggga

SEQ ID NO: 726 - RNA, 22 nt, Homo sapiens
ucccaggaagcacgauaucaca

SEQ ID NO: 727 - RNA, 18 nt, Homo sapiens
ggugggcuucccggaggg

SEQ ID NO: 728 - RNA, 18 nt, Homo sapiens
cccuccgggaagcccacc

SEQ ID NO: 729 - RNA, 18 nt, Homo sapiens
cacugcaggacucagcag

SEQ ID NO: 730 - RNA, 18 nt, Homo sapiens
cugcugaguccugcagug

SEQ ID NO: 731 - RNA, 17 nt, Homo sapiens
ugagggaggagacugca

SEQ ID NO: 732 - RNA, 17 nt, Homo sapiens
ugcagucuccucccuca

SEQ ID NO: 733 - RNA, 18 nt, Homo sapiens
gaggcugaaggaagaugg

SEQ ID NO: 734 - RNA, 18 nt, Homo sapiens
ccaucuuccuucagccuc

SEQ ID NO: 735 - RNA, 22 nt, Homo sapiens
gucacugaugucuguagcugag

SEQ ID NO: 736 - RNA, 22 nt, Homo sapiens
cucagcuacagacaucagugac

SEQ ID NO: 737 - RNA, 22 nt, Homo sapiens
accugucuguggaaaggagcua

SEQ ID NO: 738 - RNA, 22 nt, Homo sapiens
uagcuccuuuccacagacaggu

SEQ ID NO: 739 - RNA, 22 nt, Homo sapiens
agaguuaacucaaaauggacua

SEQ ID NO: 740 - RNA, 22 nt, Homo sapiens
uaguccauuuugaguuaacucu

SEQ ID NO: 741 - RNA, 22 nt, Homo sapiens
uguugggauucagcaggaccau

SEQ ID NO: 742 - RNA, 22 nt, Homo sapiens
augguccugcugaaucccaaca

SEQ ID NO: 743 - RNA, 17 nt, Homo sapiens
gaagauggacguacuuu

SEQ ID NO: 744 - RNA, 17 nt, Homo sapiens
aaaguacguccaucuuc

SEQ ID NO: 745 - RNA, 21 nt, Homo sapiens
ucugaauagagucugaagagu

SEQ ID NO: 746 - RNA, 21 nt, Homo sapiens
acucuucagacucuauucaga

SEQ ID NO: 747 - RNA, 22 nt, Homo sapiens
caaggagacgggaacauggagc

SEQ ID NO: 748 - RNA, 22 nt, Homo sapiens
gcuccauguucccgucuccuug

SEQ ID NO: 749 - RNA, 20 nt, Homo sapiens
aaaagcugggcugagaggcg

SEQ ID NO: 750 - RNA, 20 nt, Homo sapiens
cgccucucagcccagcuuuu

SEQ ID NO: 751 - RNA, 18 nt, Homo sapiens
aggcuggagugagcggag

SEQ ID NO: 752 - RNA, 18 nt, Homo sapiens
cuccgcucacuccagccu

SEQ ID NO: 753 - RNA, 22 nt, Homo sapiens
gcgacucugaaaacuagaaggu

SEQ ID NO: 754 - RNA, 22 nt, Homo sapiens
accuucuaguuuucagagucgc

SEQ ID NO: 755 - RNA, 20 nt, Homo sapiens
aaagacucugcaagaugccu

SEQ ID NO: 756 - RNA, 20 nt, Homo sapiens
aggcaucuugcagagucuuu

SEQ ID NO: 757 - RNA, 21 nt, Homo sapiens
acaggagugggggugggacau

SEQ ID NO: 758 - RNA, 21 nt, Homo sapiens
augucccacccccacuccugu

SEQ ID NO: 759 - RNA, 21 nt, Homo sapiens
cgucccaccccccacuccugu

SEQ ID NO: 760 - RNA, 21 nt, Homo sapiens
acaggaguggggggugggacg

SEQ ID NO: 761 - RNA, 18 nt, Homo sapiens
aggagaaguaaaguagaa

SEQ ID NO: 762 - RNA, 18 nt, Homo sapiens
uucuacuuuacuucuccu

SEQ ID NO: 763 - RNA, 22 nt, Homo sapiens
auggccagagcucacacagagg

SEQ ID NO: 764 - RNA, 22 nt, Homo sapiens
ccucugugugagcucuggccau

SEQ ID NO: 765 - RNA, 21 nt, Homo sapiens
ugggcucaggguacaaagguu

SEQ ID NO: 766 - RNA, 21 nt, Homo sapiens
aaccuuuguacccugagccca

SEQ ID NO: 767 - RNA, 21 nt, Homo sapiens
cacaggcuuagaaaagacagu

SEQ ID NO: 768 - RNA, 21 nt, Homo sapiens
acugucuuuucuaagccugug

SEQ ID NO: 769 - RNA, 22 nt, Homo sapiens
gugacugauaccuuggaggcau

SEQ ID NO: 770 - RNA, 22 nt, Homo sapiens
augccuccaagguaucagucac

SEQ ID NO: 771 - RNA, 22 nt, Homo sapiens
ugucguggggcuugcuggcuug

SEQ ID NO: 772 - RNA, 22 nt, Homo sapiens
caagccagcaagccccacgaca

SEQ ID NO: 773 - RNA, 17 nt, Homo sapiens
acagggaggagauugua

SEQ ID NO: 774 - RNA, 17 nt, Homo sapiens
uacaaucuccucccugu

SEQ ID NO: 775 - RNA, 17 nt, Homo sapiens
gccggacaagagggagg

SEQ ID NO: 776 - RNA, 17 nt, Homo sapiens
ccucccucuuguccggc

SEQ ID NO: 777 - RNA, 17 nt, Homo sapiens
uuggaggcguggguuuu

SEQ ID NO: 778 - RNA, 17 nt, Homo sapiens
aaaacccacgccuccaa

SEQ ID NO: 779 - RNA, 18 nt, Homo sapiens
cucgaguuggaagaggcg

SEQ ID NO: 780 - RNA, 18 nt, Homo sapiens
cgccucuuccaacucgag

SEQ ID NO: 781 - RNA, 21 nt, Homo sapiens
cacggcaaaagaaacaaucca

SEQ ID NO: 782 - RNA, 21 nt, Homo sapiens
uggauuguuucuuuugccgug

SEQ ID NO: 783 - RNA, 22 nt, Homo sapiens
agauuguuucuuuugccgugca

SEQ ID NO: 784 - RNA, 22 nt, Homo sapiens
ugcacggcaaaagaaacaaucu

SEQ ID NO: 785 - RNA, 17 nt, Homo sapiens
ggugggggcuguuguuu

SEQ ID NO: 786 - RNA, 17 nt, Homo sapiens
aaacaacagcccccacc

SEQ ID NO: 787 - RNA, 20 nt, Homo sapiens
ggcuccuuggucuaggggua

SEQ ID NO: 788 - RNA, 20 nt, Homo sapiens
uaccccuagaccaaggagcc

SEQ ID NO: 789 - RNA, 22 nt, Homo sapiens
cgucccggggcugcgcgaggca

SEQ ID NO: 790 - RNA, 22 nt, Homo sapiens
ugccucgcgcagccccgggacg

SEQ ID NO: 791 - RNA, 22 nt, Homo sapiens
uggggauuuggagaagugguga

SEQ ID NO: 792 - RNA, 22 nt, Homo sapiens
ucaccacuucuccaaaucccca

SEQ ID NO: 793 - RNA, 17 nt, Homo sapiens
ugguagagcugaggaca

SEQ ID NO: 794 - RNA, 17 nt, Homo sapiens
uguccucagcucuacca

SEQ ID NO: 795 - RNA, 23 nt, Homo sapiens
uugaauucuuggccuuaagugau

SEQ ID NO: 796 - RNA, 23 nt, Homo sapiens
aucacuuaaggccaagaauucaa

SEQ ID NO: 797 - RNA, 20 nt, Homo sapiens
gagcuuggucuguagcgguu

SEQ ID NO: 798 - RNA, 20 nt, Homo sapiens
aaccgcuacagaccaagcuc

SEQ ID NO: 799 - RNA, 20 nt, Homo sapiens
ggauccgagucacggcacca

SEQ ID NO: 800 - RNA, 20 nt, Homo sapiens
uggugccgugacucggaucc

SEQ ID NO: 801 - RNA, 17 nt, Homo sapiens
aggguguguguguuuuu

SEQ ID NO: 802 - RNA, 17 nt, Homo sapiens
aaaaacacacacacccu

SEQ ID NO: 803 - RNA, 17 nt, Homo sapiens
ccugguggcuuccuuuu

SEQ ID NO: 804 - RNA, 17 nt, Homo sapiens
aaaaggaagccaccagg

SEQ ID NO: 805 - RNA, 22 nt, Homo sapiens
ucacaagguauugacuggcgua

SEQ ID NO: 806 - RNA, 22 nt, Homo sapiens
uacgccagucaauaccuuguga

SEQ ID NO: 807 - RNA, 19 nt, Homo sapiens
agagguagguguggaagaa

SEQ ID NO: 808 - RNA, 19 nt, Homo sapiens
uucuuccacaccuaccucu

SEQ ID NO: 809 - RNA, 22 nt, Homo sapiens
ccaggaggcggaggagguggag

SEQ ID NO: 810 - RNA, 22 nt, Homo sapiens
cuccaccuccuccgccuccugg

SEQ ID NO: 811 - RNA, 22 nt, Homo sapiens
auagugguugugaauuuaccuu

SEQ ID NO: 812 - RNA, 22 nt, Homo sapiens
aagguaaauucacaaccacuau

SEQ ID NO: 813 - RNA, 23 nt, Homo sapiens
gauugagacuaguagggcuaggc

SEQ ID NO: 814 - RNA, 23 nt, Homo sapiens
gccuagcccuacuagucucaauc

SEQ ID NO: 815 - RNA, 23 nt, Homo sapiens
ugacacggaggguggcuugggaa

SEQ ID NO: 816 - RNA, 23 nt, Homo sapiens
uucccaagccacccuccguguca

SEQ ID NO: 817 - RNA, 17 nt, Homo sapiens
gagacugggguggggcc

SEQ ID NO: 818 - RNA, 17 nt, Homo sapiens
ggccccaccccagucuc

SEQ ID NO: 819 - RNA, 21 nt, Homo sapiens
aagguuuggauagaugcaaua

SEQ ID NO: 820 - RNA, 21 nt, Homo sapiens
uauugcaucuauccaaaccuu

SEQ ID NO: 821 - RNA, 22 nt, Homo sapiens
cucaaguagucugaccagggga

SEQ ID NO: 822 - RNA, 22 nt, Homo sapiens
uccccuggucagacuacuugag

SEQ ID NO: 823 - RNA, 18 nt, Homo sapiens
gggugcgggccggcgggg

SEQ ID NO: 824 - RNA, 18 nt, Homo sapiens
ccccgccggcccgcaccc

SEQ ID NO: 825 - RNA, 18 nt, Homo sapiens
agagcagaaggaugagau

SEQ ID NO: 826 - RNA, 18 nt, Homo sapiens
aucucauccuucugcucu

SEQ ID NO: 827 - RNA, 21 nt, Homo sapiens
uggcaaacguggaagccgaga

SEQ ID NO: 828 - RNA, 21 nt, Homo sapiens
ucucggcuuccacguuugcca

SEQ ID NO: 829 - RNA, 18 nt, Homo sapiens
ggugggggguguuguuuu

SEQ ID NO: 830 - RNA, 18 nt, Homo sapiens
aaaacaacaccccccacc

SEQ ID NO: 831 - RNA, 22 nt, Homo sapiens
cuagugcucuccguuacaagua

SEQ ID NO: 832 - RNA, 22 nt, Homo sapiens
uacuuguaacggagagcacuag

SEQ ID NO: 833 - RNA, 22 nt, Homo sapiens
caagggaccaagcauucauuau

SEQ ID NO: 834 - RNA, 22 nt, Homo sapiens
auaaugaaugcuuggucccuug

SEQ ID NO: 835 - RNA, 22 nt, Homo sapiens
caggaaggauuuagggacaggc

SEQ ID NO: 836 - RNA, 22 nt, Homo sapiens
gccugucccuaaauccuuccug

SEQ ID NO: 837 - RNA, 22 nt, Homo sapiens
cuauuaaggacauuugugauuc

SEQ ID NO: 838 - RNA, 22 nt, Homo sapiens
gaaucacaaauguccuuaauag

SEQ ID NO: 839 - RNA, 22 nt, Homo sapiens
auuaaggacauuugugauugau

SEQ ID NO: 840 - RNA, 22 nt, Homo sapiens
aucaaucacaaauguccuuaau

SEQ ID NO: 841 - RNA, 17 nt, Homo sapiens
gaggcugagcugaggag

SEQ ID NO: 842 - RNA, 17 nt, Homo sapiens
cuccucagcucagccuc

SEQ ID NO: 843 - RNA, 22 nt, Homo sapiens
cgcgcggccgugcucggagcag

SEQ ID NO: 844 - RNA, 22 nt, Homo sapiens
cugcuccgagcacggccgcgcg

SEQ ID NO: 845 - RNA, 21 nt, Homo sapiens
agccaaguggaaguuacuuua

SEQ ID NO: 846 - RNA, 21 nt, Homo sapiens
uaaaguaacuuccacuuggcu

SEQ ID NO: 847 - RNA, 17 nt, Homo sapiens
ggagugggcuggugguu

SEQ ID NO: 848 - RNA, 17 nt, Homo sapiens
aaccaccagcccacucc

SEQ ID NO: 849 - RNA, 22 nt, Homo sapiens
uuucuauuucucaguggggcuc

SEQ ID NO: 850 - RNA, 22 nt, Homo sapiens
gagccccacugagaaauagaaa

SEQ ID NO: 851 - RNA, 22 nt, Homo sapiens
aacccagugggcuauggaaaug

SEQ ID NO: 852 - RNA, 22 nt, Homo sapiens
cauuuccauagcccacuggguu

SEQ ID NO: 853 - RNA, 17 nt, Homo sapiens
gggguggucuguuguug

SEQ ID NO: 854 - RNA, 17 nt, Homo sapiens
caacaacagaccacccc

SEQ ID NO: 855 - RNA, 20 nt, Homo sapiens
aaaaggcgggagaagcccca

SEQ ID NO: 856 - RNA, 20 nt, Homo sapiens
uggggcuucucccgccuuuu

SEQ ID NO: 857 - RNA, 20 nt, Homo sapiens
uaacggccgcgguacccuaa

SEQ ID NO: 858 - RNA, 20 nt, Homo sapiens
uuaggguaccgcggccguua

SEQ ID NO: 859 - RNA, 17 nt, Homo sapiens
gcugggcgaggcuggca

SEQ ID NO: 860 - RNA, 17 nt, Homo sapiens
ugccagccucgcccagc

SEQ ID NO: 861 - RNA, 19 nt, Homo sapiens
agagcuggcugaagggcag

SEQ ID NO: 862 - RNA, 19 nt, Homo sapiens
cugcccuucagccagcucu

SEQ ID NO: 863 - RNA, 18 nt, Homo sapiens
agggggcgggcuccggcg

SEQ ID NO: 864 - RNA, 18 nt, Homo sapiens
cgccggagcccgcccccu

SEQ ID NO: 865 - RNA, 22 nt, Homo sapiens
ucugguaagagauuugggcaua

SEQ ID NO: 866 - RNA, 22 nt, Homo sapiens
uaugcccaaaucucuuaccaga

SEQ ID NO: 867 - RNA, 22 nt, Homo sapiens
aauguggacuggugugaccaaa

SEQ ID NO: 868 - RNA, 22 nt, Homo sapiens
uuuggucacaccaguccacauu

SEQ ID NO: 869 - RNA, 17 nt, Homo sapiens
ggggcugggcgcgcgcc

SEQ ID NO: 870 - RNA, 17 nt, Homo sapiens
ggcgcgcgcccagcccc

SEQ ID NO: 871 - RNA, 21 nt, Homo sapiens
agaaggccuuuccaucucugu

SEQ ID NO: 872 - RNA, 21 nt, Homo sapiens
acagagauggaaaggccuucu

SEQ ID NO: 873 - RNA, 22 nt, Homo sapiens
ccagacuguggcugaccagagg

SEQ ID NO: 874 - RNA, 22 nt, Homo sapiens
ccucuggucagccacagucugg

SEQ ID NO: 875 - RNA, 21 nt, Homo sapiens
aauguaaacaggcuuuuugcu

SEQ ID NO: 876 - RNA, 21 nt, Homo sapiens
agcaaaaagccuguuuacauu

SEQ ID NO: 877 - RNA, 22 nt, Homo sapiens
gaggaaacugaagcugagaggg

SEQ ID NO: 878 - RNA, 22 nt, Homo sapiens
cccucucagcuucaguuuccuc

SEQ ID NO: 879 - RNA, 17 nt, Homo sapiens
cuccgggacggcugggc

SEQ ID NO: 880 - RNA, 17 nt, Homo sapiens
gcccagccgucccggag

SEQ ID NO: 881 - RNA, 22 nt, Homo sapiens
ugggcuggcagggcaagugcug

SEQ ID NO: 882 - RNA, 22 nt, Homo sapiens
cagcacuugcccugccagccca

SEQ ID NO: 883 - RNA, 17 nt, Homo sapiens
aagacugagaggaggga

SEQ ID NO: 884 - RNA, 17 nt, Homo sapiens
ucccuccucucagucuu

SEQ ID NO: 885 - RNA, 17 nt, Homo sapiens
ugagguaguaguuucuu

SEQ ID NO: 886 - RNA, 17 nt, Homo sapiens
aagaaacuacuaccuca

SEQ ID NO: 887 - RNA, 21 nt, Homo sapiens
uaugugaccucggaugaauca

SEQ ID NO: 888 - RNA, 21 nt, Homo sapiens
ugauucauccgaggucacaua

SEQ ID NO: 889 - RNA, 22 nt, Homo sapiens
gcugaugaugauggugcugaag

SEQ ID NO: 890 - RNA, 22 nt, Homo sapiens
cuucagcaccaucaucaucagc

SEQ ID NO: 891 - RNA, 22 nt, Homo sapiens
uuuaagcaggaaauagaauuua

SEQ ID NO: 892 - RNA, 22 nt, Homo sapiens
uaaauucuauuuccugcuuaaa

SEQ ID NO: 893 - RNA, 22 nt, Homo sapiens
ugugacaauagagaugaacaug

SEQ ID NO: 894 - RNA, 22 nt, Homo sapiens
cauguucaucucuauugucaca

SEQ ID NO: 895 - RNA, 18 nt, Homo sapiens
aggcugggcugggacgga

SEQ ID NO: 896 - RNA, 18 nt, Homo sapiens
uccgucccagcccagccu

SEQ ID NO: 897 - RNA, 20 nt, Homo sapiens
aaauggguggucugaggcaa

SEQ ID NO: 898 - RNA, 20 nt, Homo sapiens
uugccucagaccacccauuu

SEQ ID NO: 899 - RNA, 20 nt, Homo sapiens
cuggguugggcugggcuggg

SEQ ID NO: 900 - RNA, 20 nt, Homo sapiens
cccagcccagcccaacccag

SEQ ID NO: 901 - RNA, 17 nt, Homo sapiens
gcggggcugggcgcgcg

SEQ ID NO: 902 - RNA, 17 nt, Homo sapiens
cgcgcgcccagccccgc

SEQ ID NO: 903 - RNA, 22 nt, Homo sapiens
acuaaaggauauagaagguuuu

SEQ ID NO: 904 - RNA, 22 nt, Homo sapiens
aaaaccuucuauauccuuuagu

SEQ ID NO: 905 - RNA, 22 nt, Homo sapiens
ugagggaguaggauguaugguu

SEQ ID NO: 906 - RNA, 22 nt, Homo sapiens
aaccauacauccuacucccuca

SEQ ID NO: 907 - RNA, 22 nt, Homo sapiens
gaagaacuguugcauuugcccu

SEQ ID NO: 908 - RNA, 22 nt, Homo sapiens
agggcaaaugcaacaguucuuc

SEQ ID NO: 909 - RNA, 22 nt, Homo sapiens
cagggccucacuguaucgccca

SEQ ID NO: 910 - RNA, 22 nt, Homo sapiens
ugggcgauacagugaggcccug

SEQ ID NO: 911 - RNA, 22 nt, Homo sapiens
agacugacggcuggaggcccau

SEQ ID NO: 912 - RNA, 22 nt, Homo sapiens
augggccuccagccgucagucu

SEQ ID NO: 913 - RNA, 18 nt, Homo sapiens
acaggcaggauuggggaa

SEQ ID NO: 914 - RNA, 18 nt, Homo sapiens
uuccccaauccugccugu

SEQ ID NO: 915 - RNA, 22 nt, Homo sapiens
aggacuggacucccggcagccc

SEQ ID NO: 916 - RNA, 22 nt, Homo sapiens
gggcugccgggaguccaguccu

SEQ ID NO: 917 - RNA, 17 nt, Homo sapiens
gggagaagggucggggc

SEQ ID NO: 918 - RNA, 17 nt, Homo sapiens
gccccgacccuucuccc

SEQ ID NO: 919 - RNA, 25 nt, Homo sapiens
aaauaugaugaaacucacagcugag

SEQ ID NO: 920 - RNA, 25 nt, Homo sapiens
cucagcugugaguuucaucauauuu

SEQ ID NO: 921 - RNA, 26 nt, Homo sapiens
gcucagggaugauaacugugcugaga

SEQ ID NO: 922 - RNA, 26 nt, Homo sapiens
ucucagcacaguuaucaucccugagc

SEQ ID NO: 923 - RNA, 18 nt, Homo sapiens
cagcagugcgcagggcug

SEQ ID NO: 924 - RNA, 18 nt, Homo sapiens
cagcccugcgcacugcug

SEQ ID NO: 925 - RNA, 22 nt, Homo sapiens
gcuaaggaaguccugugcucag

SEQ ID NO: 926 - RNA, 22 nt, Homo sapiens
cugagcacaggacuuccuuagc

SEQ ID NO: 927 - RNA, 21 nt, Homo sapiens
ugacucugccuguaggccggu

SEQ ID NO: 928 - RNA, 21 nt, Homo sapiens
accggccuacaggcagaguca

SEQ ID NO: 929 - RNA, 21 nt, Homo sapiens
gaccgagagggccucggcugu

SEQ ID NO: 930 - RNA, 21 nt, Homo sapiens
acagccgaggcccucucgguc

SEQ ID NO: 931 - RNA, 21 nt, Homo sapiens
ggggggaugugcaugcugguu

SEQ ID NO: 932 - RNA, 21 nt, Homo sapiens
aaccagcaugcacaucccccc

SEQ ID NO: 933 - RNA, 22 nt, Homo sapiens
uggucugcaaagagaugacugu

SEQ ID NO: 934 - RNA, 22 nt, Homo sapiens
acagucaucucuuugcagacca

SEQ ID NO: 935 - RNA, 22 nt, Homo sapiens
ucauuauauguaugaucuggac

SEQ ID NO: 936 - RNA, 22 nt, Homo sapiens
guccagaucauacauauaauga

SEQ ID NO: 937 - RNA, 18 nt, Homo sapiens
cccagcaggacgggagcg

SEQ ID NO: 938 - RNA, 18 nt, Homo sapiens
cgcucccguccugcuggg

SEQ ID NO: 939 - RNA, 17 nt, Homo sapiens
auggagaaggcuucuga

SEQ ID NO: 940 - RNA, 17 nt, Homo sapiens
ucagaagccuucuccau

SEQ ID NO: 941 - RNA, 17 nt, Homo sapiens
ccccggggagcccggcg

SEQ ID NO: 942 - RNA, 17 nt, Homo sapiens
cgccgggcuccccgggg

SEQ ID NO: 943 - RNA, 22 nt, Homo sapiens
uggaaggagguugccggacgcu

SEQ ID NO: 944 - RNA, 22 nt, Homo sapiens
agcguccggcaaccuccuucca

SEQ ID NO: 945 - RNA, 17 nt, Homo sapiens
ggauggaggaggggucu

SEQ ID NO: 946 - RNA, 17 nt, Homo sapiens
agaccccuccuccaucc

SEQ ID NO: 947 - RNA, 17 nt, Homo sapiens
guggaccuggcugggac

SEQ ID NO: 948 - RNA, 17 nt, Homo sapiens
gucccagccagguccac

SEQ ID NO: 949 - RNA, 21 nt, Homo sapiens
ucgugcauauaucuaccacau

SEQ ID NO: 950 - RNA, 21 nt, Homo sapiens
augugguagauauaugcacga

SEQ ID NO: 951 - RNA, 21 nt, Homo sapiens
ugugguagauauaugcacgau

SEQ ID NO: 952 - RNA, 21 nt, Homo sapiens
aucgugcauauaucuaccaca

SEQ ID NO: 953 - RNA, 22 nt, Homo sapiens
ugagccgagcugagcuuagcug

SEQ ID NO: 954 - RNA, 22 nt, Homo sapiens
cagcuaagcucagcucggcuca

SEQ ID NO: 955 - RNA, 22 nt, Homo sapiens
gagcuuggaugagcugggcuga

SEQ ID NO: 956 - RNA, 22 nt, Homo sapiens
ucagcccagcucauccaagcuc

SEQ ID NO: 957 - RNA, 22 nt, Homo sapiens
gcugaacugggcugagcugggc

SEQ ID NO: 958 - RNA, 22 nt, Homo sapiens
gcccagcucagcccaguucagc

SEQ ID NO: 959 - RNA, 21 nt, Homo sapiens
uuaguccugccuguagguuua

SEQ ID NO: 960 - RNA, 21 nt, Homo sapiens
uaaaccuacaggcaggacuaa

SEQ ID NO: 961 - RNA, 20 nt, Homo sapiens
uugggcugggcuggguuggg

SEQ ID NO: 962 - RNA, 20 nt, Homo sapiens
cccaacccagcccagcccaa

SEQ ID NO: 963 - RNA, 20 nt, Homo sapiens
uaggaugggggugagaggug

SEQ ID NO: 964 - RNA, 20 nt, Homo sapiens
caccucucacccccauccua

SEQ ID NO: 965 - RNA, 22 nt, Homo sapiens
aaaaguaauuguggauuuugcu

SEQ ID NO: 966 - RNA, 22 nt, Homo sapiens
agcaaaauccacaauuacuuuu

SEQ ID NO: 967 - RNA, 22 nt, Homo sapiens
caaaaaccggcaauuacuuuug

SEQ ID NO: 968 - RNA, 22 nt, Homo sapiens
caaaaguaauugccgguuuuug

SEQ ID NO: 969 - RNA, 22 nt, Homo sapiens
gaaaacgacaaugacuuuugca

SEQ ID NO: 970 - RNA, 22 nt, Homo sapiens
ugcaaaagucauugucguuuuc

SEQ ID NO: 971 - RNA, 21 nt, Homo sapiens
caaaaacugcaauuacuuuca

SEQ ID NO: 972 - RNA, 21 nt, Homo sapiens
ugaaaguaauugcaguuuuug

SEQ ID NO: 973 - RNA, 21 nt, Homo sapiens
aaagguaauugugguuucugc

SEQ ID NO: 974 - RNA, 21 nt, Homo sapiens
gcagaaaccacaauuaccuuu

SEQ ID NO: 975 - RNA, 22 nt, Homo sapiens
caaaaacugcaguuacuuuugc

SEQ ID NO: 976 - RNA, 22 nt, Homo sapiens
gcaaaaguaacugcaguuuuug

SEQ ID NO: 977 - RNA, 20 nt, Homo sapiens
aaaagugauugcaguguuug

SEQ ID NO: 978 - RNA, 20 nt, Homo sapiens
caaacacugcaaucacuuuu

SEQ ID NO: 979 - RNA, 22 nt, Homo sapiens
aaagguaauugcaguuuuuccc

SEQ ID NO: 980 - RNA, 22 nt, Homo sapiens
gggaaaaacugcaauuaccuuu

SEQ ID NO: 981 - RNA, 21 nt, Homo sapiens
uaaaaacugcaauuacuuuua

SEQ ID NO: 982 - RNA, 21 nt, Homo sapiens
uaaaaguaauugcaguuuuua

SEQ ID NO: 983 - RNA, 23 nt, Homo sapiens
ugcaaaaguaauugcaguuuuug

SEQ ID NO: 984 - RNA, 23 nt, Homo sapiens
caaaaacugcaauuacuuuugca

SEQ ID NO: 985 - RNA, 21 nt, Homo sapiens
aaaaguaacugcgguuuuuga

SEQ ID NO: 986 - RNA, 21 nt, Homo sapiens
ucaaaaaccgcaguuacuuuu

SEQ ID NO: 987 - RNA, 22 nt, Homo sapiens
aacggcaaugacuuuuguacca

SEQ ID NO: 988 - RNA, 22 nt, Homo sapiens
ugguacaaaagucauugccguu

SEQ ID NO: 989 - RNA, 22 nt, Homo sapiens
caaaaacugcaguuacuuuugu

SEQ ID NO: 990 - RNA, 22 nt, Homo sapiens
acaaaaguaacugcaguuuuug

SEQ ID NO: 991 - RNA, 22 nt, Homo sapiens
aaaaguaauugcgguuuuugcc

SEQ ID NO: 992 - RNA, 22 nt, Homo sapiens
ggcaaaaaccgcaauuacuuuu

SEQ ID NO: 993 - RNA, 20 nt, Homo sapiens
aaaaggcauugugguuuuug

SEQ ID NO: 994 - RNA, 20 nt, Homo sapiens
caaaaaccacaaugccuuuu

SEQ ID NO: 995 - RNA, 23 nt, Homo sapiens
cggcccgggcugcugcuguuccu

SEQ ID NO: 996 - RNA, 23 nt, Homo sapiens
aggaacagcagcagcccgggccg

SEQ ID NO: 997 - RNA, 20 nt, Homo sapiens
agagguauagggcaugggaa

SEQ ID NO: 998 - RNA, 20 nt, Homo sapiens
uucccaugcccuauaccucu

SEQ ID NO: 999 - RNA, 22 nt, Homo sapiens
uuccuaugcauauacuucuuug

SEQ ID NO: 1000 - RNA, 22 nt, Homo sapiens
caaagaaguauaugcauaggaa

SEQ ID NO: 1001 - RNA, 22 nt, Homo sapiens
aucauagaggaaaauccauguu

SEQ ID NO: 1002 - RNA, 22 nt, Homo sapiens
aacauggauuuuccucuaugau

SEQ ID NO: 1003 - RNA, 22 nt, Homo sapiens
cguggauauuccuucuauguuu

SEQ ID NO: 1004 - RNA, 22 nt, Homo sapiens
aaacauagaaggaauauccacg

SEQ ID NO: 1005 - RNA, 22 nt, Homo sapiens
ugaguauuacauggccaaucuc

SEQ ID NO: 1006 - RNA, 22 nt, Homo sapiens
gagauuggccauguaauacuca

SEQ ID NO: 1007 - RNA, 21 nt, Homo sapiens
cuuccgccccgccgggcgucg

SEQ ID NO: 1008 - RNA, 21 nt, Homo sapiens
cgacgcccggcggggcggaag

SEQ ID NO: 1009 - RNA, 22 nt, Homo sapiens
uagcuuaucagacugauguuga

SEQ ID NO: 1010 - RNA, 22 nt, Homo sapiens
ucaacaucagucugauaagcua

SEQ ID NO: 1011 - RNA, 22 nt, Homo sapiens
cacuagauugugagcuccugga

SEQ ID NO: 1012 - RNA, 22 nt, Homo sapiens
uccaggagcucacaaucuagug

SEQ ID NO: 1013 - RNA, 22 nt, Homo sapiens
aaggagcucacagucuauugag

SEQ ID NO: 1014 - RNA, 22 nt, Homo sapiens
cucaauagacugugagcuccuu

SEQ ID NO: 1015 - RNA, 22 nt, Homo sapiens
uacgucaucguugucaucguca

SEQ ID NO: 1016 - RNA, 22 nt, Homo sapiens
ugacgaugacaacgaugacgua

SEQ ID NO: 1017 - RNA, 22 nt, Homo sapiens
cacgcucaugcacacacccaca

SEQ ID NO: 1018 - RNA, 22 nt, Homo sapiens
ugugggugugugcaugagcgug

SEQ ID NO: 1019 - RNA, 21 nt, Homo sapiens
caacaccagucgaugggcugu

SEQ ID NO: 1020 - RNA, 21 nt, Homo sapiens
acagcccaucgacugguguug

SEQ ID NO: 1021 - RNA, 22 nt, Homo sapiens
uucaccaccuucuccacccagc

SEQ ID NO: 1022 - RNA, 22 nt, Homo sapiens
gcuggguggagaagguggugaa

SEQ ID NO: 1023 - RNA, 23 nt, Homo sapiens
cggguagagagggcagugggagg

SEQ ID NO: 1024 - RNA, 23 nt, Homo sapiens
ccucccacugcccucucuacccg

SEQ ID NO: 1025 - RNA, 18 nt, Homo sapiens
aauccuugcuaccugggu

SEQ ID NO: 1026 - RNA, 18 nt, Homo sapiens
acccagguagcaaggauu

SEQ ID NO: 1027 - RNA, 22 nt, Homo sapiens
caauuuagugugugugauauuu

SEQ ID NO: 1028 - RNA, 22 nt, Homo sapiens
aaauaucacacacacuaaauug

SEQ ID NO: 1029 - RNA, 22 nt, Homo sapiens
uauugcacauuacuaaguugca

SEQ ID NO: 1030 - RNA, 22 nt, Homo sapiens
ugcaacuuaguaaugugcaaua

SEQ ID NO: 1031 - RNA, 22 nt, Homo sapiens
ccuauucuugauuacuuguuuc

SEQ ID NO: 1032 - RNA, 22 nt, Homo sapiens
gaaacaaguaaucaagaauagg

SEQ ID NO: 1033 - RNA, 22 nt, Homo sapiens
uucaaguaauccaggauaggcu

SEQ ID NO: 1034 - RNA, 22 nt, Homo sapiens
agccuauccuggauuacuugaa

SEQ ID NO: 1035 - RNA, 23 nt, Homo sapiens
ccaguuaccgcuuccgcuaccgc

SEQ ID NO: 1036 - RNA, 23 nt, Homo sapiens
gcgguagcggaagcgguaacugg

SEQ ID NO: 1037 - RNA, 21 nt, Homo sapiens
gauuucaguggagugaaguuc

SEQ ID NO: 1038 - RNA, 21 nt, Homo sapiens
gaacuucacuccacugaaauc

SEQ ID NO: 1039 - RNA, 22 nt, Homo sapiens
uccuucauuccaccggagucug

SEQ ID NO: 1040 - RNA, 22 nt, Homo sapiens
cagacuccgguggaaugaagga

SEQ ID NO: 1041 - RNA, 23 nt, Homo sapiens
aaaauggugcccuagugacuaca

SEQ ID NO: 1042 - RNA, 23 nt, Homo sapiens
uguagucacuagggcaccauuuu

SEQ ID NO: 1043 - RNA, 21 nt, Homo sapiens
caagucacuagugguuccguu

SEQ ID NO: 1044 - RNA, 21 nt, Homo sapiens
aacggaaccacuagugacuug

SEQ ID NO: 1045 - RNA, 22 nt, Homo sapiens
ccaguauuaacugugcugcuga

SEQ ID NO: 1046 - RNA, 22 nt, Homo sapiens
ucagcagcacaguuaauacugg

SEQ ID NO: 1047 - RNA, 23 nt, Homo sapiens
ucccccaggugugauucugauuu

SEQ ID NO: 1048 - RNA, 23 nt, Homo sapiens
aaaucagaaucacaccuggggga

SEQ ID NO: 1049 - RNA, 22 nt, Homo sapiens
aaaagcuggguugagagggcga

SEQ ID NO: 1050 - RNA, 22 nt, Homo sapiens
ucgcccucucaacccagcuuuu

SEQ ID NO: 1051 - RNA, 22 nt, Homo sapiens
uggacggagaacugauaagggu

SEQ ID NO: 1052 - RNA, 22 nt, Homo sapiens
acccuuaucaguucuccgucca

SEQ ID NO: 1053 - RNA, 22 nt, Homo sapiens
uggugggccgcagaacaugugc

SEQ ID NO: 1054 - RNA, 22 nt, Homo sapiens
gcacauguucugcggcccacca

SEQ ID NO: 1055 - RNA, 22 nt, Homo sapiens
agugccugcuaugugccaggca

SEQ ID NO: 1056 - RNA, 22 nt, Homo sapiens
ugccuggcacauagcaggcacu

SEQ ID NO: 1057 - RNA, 22 nt, Homo sapiens
cuuggcaccuagcaagcacuca

SEQ ID NO: 1058 - RNA, 22 nt, Homo sapiens
ugagugcuugcuaggugccaag

SEQ ID NO: 1059 - RNA, 23 nt, Homo sapiens
uuauugcuuaagaauacgcguag

SEQ ID NO: 1060 - RNA, 23 nt, Homo sapiens
cuacgcguauucuuaagcaauaa

SEQ ID NO: 1061 - RNA, 22 nt, Homo sapiens
uugcauagucacaaaagugauc

SEQ ID NO: 1062 - RNA, 22 nt, Homo sapiens
gaucacuuuugugacuaugcaa

SEQ ID NO: 1063 - RNA, 22 nt, Homo sapiens
gugaauuaccgaagggccauaa

SEQ ID NO: 1064 - RNA, 22 nt, Homo sapiens
uuauggcccuucgguaauucac

SEQ ID NO: 1065 - RNA, 22 nt, Homo sapiens
uauggcacugguagaauucacu

SEQ ID NO: 1066 - RNA, 22 nt, Homo sapiens
agugaauucuaccagugccaua

SEQ ID NO: 1067 - RNA, 22 nt, Homo sapiens
ugauauguuugauauauuaggu

SEQ ID NO: 1068 - RNA, 22 nt, Homo sapiens
accuaauauaucaaacauauca

SEQ ID NO: 1069 - RNA, 21 nt, Homo sapiens
ugauauguuugauauuggguu

SEQ ID NO: 1070 - RNA, 21 nt, Homo sapiens
aacccaauaucaaacauauca

SEQ ID NO: 1071 - RNA, 18 nt, Homo sapiens
agcaggugcggggcggcg

SEQ ID NO: 1072 - RNA, 18 nt, Homo sapiens
cgccgccccgcaccugcu

SEQ ID NO: 1073 - RNA, 21 nt, Homo sapiens
cagugcaaguguagaugccga

SEQ ID NO: 1074 - RNA, 21 nt, Homo sapiens
ucggcaucuacacuugcacug

SEQ ID NO: 1075 - RNA, 22 nt, Homo sapiens
uauguaauaugguccacaucuu

SEQ ID NO: 1076 - RNA, 22 nt, Homo sapiens
aagauguggaccauauuacaua

SEQ ID NO: 1077 - RNA, 21 nt, Homo sapiens
aauauaacacagauggccugu

SEQ ID NO: 1078 - RNA, 21 nt, Homo sapiens
acaggccaucuguguuauauu

SEQ ID NO: 1079 - RNA, 22 nt, Homo sapiens
aucgggaaugucguguccgccc

SEQ ID NO: 1080 - RNA, 22 nt, Homo sapiens
gggcggacacgacauucccgau

SEQ ID NO: 1081 - RNA, 23 nt, Homo sapiens
aaugacacgaucacucccguuga

SEQ ID NO: 1082 - RNA, 23 nt, Homo sapiens
ucaacgggagugaucgugucauu

SEQ ID NO: 1083 - RNA, 22 nt, Homo sapiens
uacucaggagaguggcaaucac

SEQ ID NO: 1084 - RNA, 22 nt, Homo sapiens
gugauugccacucuccugagua

SEQ ID NO: 1085 - RNA, 23 nt, Homo sapiens
uggaagacuagugauuuuguugu

SEQ ID NO: 1086 - RNA, 23 nt, Homo sapiens
acaacaaaaucacuagucuucca

SEQ ID NO: 1087 - RNA, 22 nt, Homo sapiens
auaaagcuagauaaccgaaagu

SEQ ID NO: 1088 - RNA, 22 nt, Homo sapiens
acuuucgguuaucuagcuuuau

SEQ ID NO: 1089 - RNA, 23 nt, Homo sapiens
ucuuugguuaucuagcuguauga

SEQ ID NO: 1090 - RNA, 23 nt, Homo sapiens
ucauacagcuagauaaccaaaga

SEQ ID NO: 1091 - RNA, 22 nt, Homo sapiens
acaggugagguucuugggagcc

SEQ ID NO: 1092 - RNA, 22 nt, Homo sapiens
ggcucccaagaaccucaccugu

SEQ ID NO: 1093 - RNA, 24 nt, Homo sapiens
ucccugagacccuuuaaccuguga

SEQ ID NO: 1094 - RNA, 24 nt, Homo sapiens
ucacagguuaaagggucucaggga

SEQ ID NO: 1095 - RNA, 22 nt, Homo sapiens
caacaaaucccagucuaccuaa

SEQ ID NO: 1096 - RNA, 22 nt, Homo sapiens
uuagguagacugggauuuguug

SEQ ID NO: 1097 - RNA, 22 nt, Homo sapiens
cguguucacagcggaccuugau

SEQ ID NO: 1098 - RNA, 22 nt, Homo sapiens
aucaagguccgcugugaacacg

SEQ ID NO: 1099 - RNA, 20 nt, Homo sapiens
uaaggcacgcggugaaugcc

SEQ ID NO: 1100 - RNA, 20 nt, Homo sapiens
ggcauucaccgcgugccuua

SEQ ID NO: 1101 - RNA, 22 nt, Homo sapiens
aacacaccugguuaaccucuuu

SEQ ID NO: 1102 - RNA, 22 nt, Homo sapiens
aaagagguuaaccagguguguu

SEQ ID NO: 1103 - RNA, 22 nt, Homo sapiens
uaacagucuacagccauggucg

SEQ ID NO: 1104 - RNA, 22 nt, Homo sapiens
cgaccauggcuguagacuguua

SEQ ID NO: 1105 - RNA, 22 nt, Homo sapiens
accguggcuuucgauuguuacu

SEQ ID NO: 1106 - RNA, 22 nt, Homo sapiens
aguaacaaucgaaagccacggu

SEQ ID NO: 1107 - RNA, 21 nt, Homo sapiens
uaacagucuccagucacggcc

SEQ ID NO: 1108 - RNA, 21 nt, Homo sapiens
ggccgugacuggagacuguua

SEQ ID NO: 1109 - RNA, 23 nt, Homo sapiens
accuuggcucuagacugcuuacu

SEQ ID NO: 1110 - RNA, 23 nt, Homo sapiens
aguaagcagucuagagccaaggu

SEQ ID NO: 1111 - RNA, 23 nt, Homo sapiens
ucucacacagaaaucgcacccgu

SEQ ID NO: 1112 - RNA, 23 nt, Homo sapiens
acgggugcgauuucugugugaga

SEQ ID NO: 1113 - RNA, 22 nt, Homo sapiens
ugguugaccauagaacaugcgc

SEQ ID NO: 1114 - RNA, 22 nt, Homo sapiens
gcgcauguucuauggucaacca

SEQ ID NO: 1115 - RNA, 23 nt, Homo sapiens
caguaacaaagauucauccuugu

SEQ ID NO: 1116 - RNA, 23 nt, Homo sapiens
acaaggaugaaucuuuguuacug

SEQ ID NO: 1117 - RNA, 22 nt, Homo sapiens
agaguugagucuggacgucccg

SEQ ID NO: 1118 - RNA, 22 nt, Homo sapiens
cgggacguccagacucaacucu

SEQ ID NO: 1119 - RNA, 22 nt, Homo sapiens
agaauuguggcuggacaucugu

SEQ ID NO: 1120 - RNA, 22 nt, Homo sapiens
acagauguccagccacaauucu

SEQ ID NO: 1121 - RNA, 21 nt, Homo sapiens
ugauuguccaaacgcaauucu

SEQ ID NO: 1122 - RNA, 21 nt, Homo sapiens
agaauugcguuuggacaauca

SEQ ID NO: 1123 - RNA, 22 nt, Homo sapiens
uauagggauuggagccguggcg

SEQ ID NO: 1124 - RNA, 22 nt, Homo sapiens
cgccacggcuccaaucccuaua

SEQ ID NO: 1125 - RNA, 23 nt, Homo sapiens
uauggcuuuuuauuccuauguga

SEQ ID NO: 1126 - RNA, 23 nt, Homo sapiens
ucacauaggaauaaaaagccaua

SEQ ID NO: 1127 - RNA, 22 nt, Homo sapiens
auguagggcuaaaagccauggg

SEQ ID NO: 1128 - RNA, 22 nt, Homo sapiens
cccauggcuuuuagcccuacau

SEQ ID NO: 1129 - RNA, 23 nt, Homo sapiens
uauggcuuuucauuccuauguga

SEQ ID NO: 1130 - RNA, 23 nt, Homo sapiens
ucacauaggaaugaaaagccaua

SEQ ID NO: 1131 - RNA, 22 nt, Homo sapiens
aaccaucgaccguugaguggac

SEQ ID NO: 1132 - RNA, 22 nt, Homo sapiens
guccacucaacggucgaugguu

SEQ ID NO: 1133 - RNA, 22 nt, Homo sapiens
aacauucaaccugucggugagu

SEQ ID NO: 1134 - RNA, 22 nt, Homo sapiens
acucaccgacagguugaauguu

SEQ ID NO: 1135 - RNA, 25 nt, Homo sapiens
cuuccagacgcuccgccccacgucg

SEQ ID NO: 1136 - RNA, 25 nt, Homo sapiens
cgacguggggcggagcgucuggaag

SEQ ID NO: 1137 - RNA, 24 nt, Homo sapiens
aacaacaaaaucacuagucuucca

SEQ ID NO: 1138 - RNA, 24 nt, Homo sapiens
uggaagacuagugauuuuguuguu

SEQ ID NO: 1139 - RNA, 22 nt, Homo sapiens
agguagacugggauuuguuguu

SEQ ID NO: 1140 - RNA, 22 nt, Homo sapiens
aacaacaaaucccagucuaccu

SEQ ID NO: 1141 - RNA, 22 nt, Homo sapiens
aaacaccauugucacacuccac

SEQ ID NO: 1142 - RNA, 22 nt, Homo sapiens
guggagugugacaaugguguuu

SEQ ID NO: 1143 - RNA, 23 nt, Homo sapiens
uuuagugugauaauggcguuuga

SEQ ID NO: 1144 - RNA, 23 nt, Homo sapiens
ucaaacgccauuaucacacuaaa

SEQ ID NO: 1145 - RNA, 22 nt, Homo sapiens
uauggaaagacuuugccacucu

SEQ ID NO: 1146 - RNA, 22 nt, Homo sapiens
agaguggcaaagucuuuccaua

SEQ ID NO: 1147 - RNA, 21 nt, Homo sapiens
aguggcaaagucuuuccauau

SEQ ID NO: 1148 - RNA, 21 nt, Homo sapiens
auauggaaagacuuugccacu

SEQ ID NO: 1149 - RNA, 22 nt, Homo sapiens
cagcccggaucccagcccacuu

SEQ ID NO: 1150 - RNA, 22 nt, Homo sapiens
aagugggcugggauccgggcug

SEQ ID NO: 1151 - RNA, 20 nt, Homo sapiens
guggguuggggcgggcucug

SEQ ID NO: 1152 - RNA, 20 nt, Homo sapiens
cagagcccgccccaacccac

SEQ ID NO: 1153 - RNA, 23 nt, Homo sapiens
uucgggcuggccugcugcuccgg

SEQ ID NO: 1154 - RNA, 23 nt, Homo sapiens
ccggagcagcaggccagcccgaa

SEQ ID NO: 1155 - RNA, 21 nt, Homo sapiens
ugugcagcaggccaaccgaga

SEQ ID NO: 1156 - RNA, 21 nt, Homo sapiens
ucucgguuggccugcugcaca

SEQ ID NO: 1157 - RNA, 22 nt, Homo sapiens
cagggcaggaagaaguggacaa

SEQ ID NO: 1158 - RNA, 22 nt, Homo sapiens
uuguccacuucuuccugcccug

SEQ ID NO: 1159 - RNA, 22 nt, Homo sapiens
guccacuucugccugcccugcc

SEQ ID NO: 1160 - RNA, 22 nt, Homo sapiens
ggcagggcaggcagaaguggac

SEQ ID NO: 1161 - RNA, 22 nt, Homo sapiens
uuuggacagaaaacacgcaggu

SEQ ID NO: 1162 - RNA, 22 nt, Homo sapiens
accugcguguuuucuguccaaa

SEQ ID NO: 1163 - RNA, 20 nt, Homo sapiens
ccugcguguuuucuguccaa

SEQ ID NO: 1164 - RNA, 20 nt, Homo sapiens
uuggacagaaaacacgcagg

SEQ ID NO: 1165 - RNA, 22 nt, Homo sapiens
ugccgcccucucgcugcucuag

SEQ ID NO: 1166 - RNA, 22 nt, Homo sapiens
cuagagcagcgagagggcggca

SEQ ID NO: 1167 - RNA, 23 nt, Homo sapiens
gagggcagcguggguguggcgga

SEQ ID NO: 1168 - RNA, 23 nt, Homo sapiens
uccgccacacccacgcugcccuc

SEQ ID NO: 1169 - RNA, 22 nt, Homo sapiens
aggagcuagccaggcauaugca

SEQ ID NO: 1170 - RNA, 22 nt, Homo sapiens
ugcauaugccuggcuagcuccu

SEQ ID NO: 1171 - RNA, 20 nt, Homo sapiens
auaugccuggcuagcuccuc

SEQ ID NO: 1172 - RNA, 20 nt, Homo sapiens
gaggagcuagccaggcauau

SEQ ID NO: 1173 - RNA, 19 nt, Homo sapiens
cggcgcgaccggcccgggg

SEQ ID NO: 1174 - RNA, 19 nt, Homo sapiens
ccccgggccggucgcgccg

SEQ ID NO: 1175 - RNA, 21 nt, Homo sapiens
ucuugaagucagaacccgcaa

SEQ ID NO: 1176 - RNA, 21 nt, Homo sapiens
uugcggguucugacuucaaga

SEQ ID NO: 1177 - RNA, 22 nt, Homo sapiens
aacucguguucaaagccuuuag

SEQ ID NO: 1178 - RNA, 22 nt, Homo sapiens
cuaaaggcuuugaacacgaguu

SEQ ID NO: 1179 - RNA, 23 nt, Homo sapiens
ccuggacaccgcucagccggccg

SEQ ID NO: 1180 - RNA, 23 nt, Homo sapiens
cggccggcugagcgguguccagg

SEQ ID NO: 1181 - RNA, 21 nt, Homo sapiens
acucggcugcgguggacaagu

SEQ ID NO: 1182 - RNA, 21 nt, Homo sapiens
acuuguccaccgcagccgagu

SEQ ID NO: 1183 - RNA, 20 nt, Homo sapiens
ucacucucaccuugcuuugc

SEQ ID NO: 1184 - RNA, 20 nt, Homo sapiens
gcaaagcaaggugagaguga

SEQ ID NO: 1185 - RNA, 22 nt, Homo sapiens
uugcuaaguaggcugagauuga

SEQ ID NO: 1186 - RNA, 22 nt, Homo sapiens
ucaaucucagccuacuuagcaa

SEQ ID NO: 1187 - RNA, 22 nt, Homo sapiens
cacccccuguuuccuggcccac

SEQ ID NO: 1188 - RNA, 22 nt, Homo sapiens
gugggccaggaaacagggggug

SEQ ID NO: 1189 - RNA, 23 nt, Homo sapiens
ugggccagggagcagcugguggg

SEQ ID NO: 1190 - RNA, 23 nt, Homo sapiens
cccaccagcugcucccuggccca

SEQ ID NO: 1191 - RNA, 24 nt, Homo sapiens
ugcccaugccauacuuuugccuca

SEQ ID NO: 1192 - RNA, 24 nt, Homo sapiens
ugaggcaaaaguauggcaugggca

SEQ ID NO: 1193 - RNA, 22 nt, Homo sapiens
auggcaucguccccugguggcu

SEQ ID NO: 1194 - RNA, 22 nt, Homo sapiens
agccaccaggggacgaugccau

SEQ ID NO: 1195 - RNA, 22 nt, Homo sapiens
gacacaugaccauaaaugcuaa

SEQ ID NO: 1196 - RNA, 22 nt, Homo sapiens
uuagcauuuauggucauguguc

SEQ ID NO: 1197 - RNA, 23 nt, Homo sapiens
uggagagagaaaagagacagaag

SEQ ID NO: 1198 - RNA, 23 nt, Homo sapiens
cuucugucucuuuucucucucca

SEQ ID NO: 1199 - RNA, 22 nt, Homo sapiens
agacaguaguucuugccugguu

SEQ ID NO: 1200 - RNA, 22 nt, Homo sapiens
aaccaggcaagaacuacugucu

SEQ ID NO: 1201 - RNA, 19 nt, Homo sapiens
accaggcaagaaauauugu

SEQ ID NO: 1202 - RNA, 19 nt, Homo sapiens
acaauauuucuugccuggu

SEQ ID NO: 1203 - RNA, 21 nt, Homo sapiens
auugucccucucccuucccag

SEQ ID NO: 1204 - RNA, 21 nt, Homo sapiens
cugggaagggagagggacaau

SEQ ID NO: 1205 - RNA, 22 nt, Homo sapiens
acugggaagaggagcugaggga

SEQ ID NO: 1206 - RNA, 22 nt, Homo sapiens
ucccucagcuccucuucccagu

SEQ ID NO: 1207 - RNA, 23 nt, Homo sapiens
gaagauggugcugugcugaggaa

SEQ ID NO: 1208 - RNA, 23 nt, Homo sapiens
uuccucagcacagcaccaucuuc

SEQ ID NO: 1209 - RNA, 20 nt, Homo sapiens
ugugggacugcaaaugggag

SEQ ID NO: 1210 - RNA, 20 nt, Homo sapiens
cucccauuugcagucccaca

SEQ ID NO: 1211 - RNA, 21 nt, Homo sapiens
ucugaggccugccucucccca

SEQ ID NO: 1212 - RNA, 21 nt, Homo sapiens
uggggagaggcaggccucaga

SEQ ID NO: 1213 - RNA, 24 nt, Homo sapiens
ugggcgaggggugggcucucagag

SEQ ID NO: 1214 - RNA, 24 nt, Homo sapiens
cucugagagcccaccccucgccca

SEQ ID NO: 1215 - RNA, 21 nt, Homo sapiens
agguagaaugaggccugacau

SEQ ID NO: 1216 - RNA, 21 nt, Homo sapiens
augucaggccucauucuaccu

SEQ ID NO: 1217 - RNA, 19 nt, Homo sapiens
ucaggccucuuucuaccuu

SEQ ID NO: 1218 - RNA, 19 nt, Homo sapiens
aagguagaaagaggccuga

SEQ ID NO: 1219 - RNA, 20 nt, Homo sapiens
cggggugggugaggucgggc

SEQ ID NO: 1220 - RNA, 20 nt, Homo sapiens
gcccgaccucacccaccccg

SEQ ID NO: 1221 - RNA, 22 nt, Homo sapiens
guucuguuaacccauccccuca

SEQ ID NO: 1222 - RNA, 22 nt, Homo sapiens
ugaggggauggguuaacagaac

SEQ ID NO: 1223 - RNA, 22 nt, Homo sapiens
aggggacugguuaauagaacua

SEQ ID NO: 1224 - RNA, 22 nt, Homo sapiens
uaguucuauuaaccaguccccu

SEQ ID NO: 1225 - RNA, 23 nt, Homo sapiens
uggaguuaaggguugcuuggaga

SEQ ID NO: 1226 - RNA, 23 nt, Homo sapiens
ucuccaagcaacccuuaacucca

SEQ ID NO: 1227 - RNA, 22 nt, Homo sapiens
ucucugagcaaggcuuaacacc

SEQ ID NO: 1228 - RNA, 22 nt, Homo sapiens
gguguuaagccuugcucagaga

SEQ ID NO: 1229 - RNA, 22 nt, Homo sapiens
ugugggaucuggaggcaucugg

SEQ ID NO: 1230 - RNA, 22 nt, Homo sapiens
ccagaugccuccagaucccaca

SEQ ID NO: 1231 - RNA, 21 nt, Homo sapiens
acccucgucagguccccgggg

SEQ ID NO: 1232 - RNA, 21 nt, Homo sapiens
ccccggggaccugacgagggu

SEQ ID NO: 1233 - RNA, 22 nt, Homo sapiens
caccggggauggcagagggucg

SEQ ID NO: 1234 - RNA, 22 nt, Homo sapiens
cgacccucugccauccccggug

SEQ ID NO: 1235 - RNA, 23 nt, Homo sapiens
ugggcugagggcaggaggccugu

SEQ ID NO: 1236 - RNA, 23 nt, Homo sapiens
acaggccuccugcccucagccca

SEQ ID NO: 1237 - RNA, 23 nt, Homo sapiens
aauguggaaguggucugaggcau

SEQ ID NO: 1238 - RNA, 23 nt, Homo sapiens
augccucagaccacuuccacauu

SEQ ID NO: 1239 - RNA, 23 nt, Homo sapiens
gugaguguggauccuggaggaau

SEQ ID NO: 1240 - RNA, 23 nt, Homo sapiens
auuccuccaggauccacacucac

SEQ ID NO: 1241 - RNA, 22 nt, Homo sapiens
uuucuucuuagacauggcaacg

SEQ ID NO: 1242 - RNA, 22 nt, Homo sapiens
cguugccaugucuaagaagaaa

SEQ ID NO: 1243 - RNA, 22 nt, Homo sapiens
cugccaugucuaagaagaaaac

SEQ ID NO: 1244 - RNA, 22 nt, Homo sapiens
guuuucuucuuagacauggcag

SEQ ID NO: 1245 - RNA, 22 nt, Homo sapiens
uuucuucuuagacauggcagcu

SEQ ID NO: 1246 - RNA, 22 nt, Homo sapiens
agcugccaugucuaagaagaaa

SEQ ID NO: 1247 - RNA, 19 nt, Homo sapiens
uugccaugucuaagaagaa

SEQ ID NO: 1248 - RNA, 19 nt, Homo sapiens
uucuucuuagacauggcaa

SEQ ID NO: 1249 - RNA, 23 nt, Homo sapiens
ugcagcucugguggaaaauggag

SEQ ID NO: 1250 - RNA, 23 nt, Homo sapiens
cuccauuuuccaccagagcugca

SEQ ID NO: 1251 - RNA, 22 nt, Homo sapiens
caggauccacagagcuagucca

SEQ ID NO: 1252 - RNA, 22 nt, Homo sapiens
uggacuagcucuguggauccug

SEQ ID NO: 1253 - RNA, 22 nt, Homo sapiens
aacuagcucuguggauccugac

SEQ ID NO: 1254 - RNA, 22 nt, Homo sapiens
gucaggauccacagagcuaguu

SEQ ID NO: 1255 - RNA, 22 nt, Homo sapiens
aaagauggacaauuggcuaaau

SEQ ID NO: 1256 - RNA, 22 nt, Homo sapiens
auuuagccaauuguccaucuuu

SEQ ID NO: 1257 - RNA, 24 nt, Homo sapiens
agcugagcuccauggacgugcagu

SEQ ID NO: 1258 - RNA, 24 nt, Homo sapiens
acugcacguccauggagcucagcu

SEQ ID NO: 1259 - RNA, 22 nt, Homo sapiens
cuuccggucugugagccccguc

SEQ ID NO: 1260 - RNA, 22 nt, Homo sapiens
gacggggcucacagaccggaag

SEQ ID NO: 1261 - RNA, 22 nt, Homo sapiens
uggggugcccacuccgcaaguu

SEQ ID NO: 1262 - RNA, 22 nt, Homo sapiens
aacuugcggagugggcacccca

SEQ ID NO: 1263 - RNA, 26 nt, Homo sapiens
cucggccgcggcgcguagcccccgcc

SEQ ID NO: 1264 - RNA, 26 nt, Homo sapiens
ggcgggggcuacgcgccgcggccgag

SEQ ID NO: 1265 - RNA, 23 nt, Homo sapiens
cugggggacgcgugagcgcgagc

SEQ ID NO: 1266 - RNA, 23 nt, Homo sapiens
gcucgcgcucacgcgucccccag

SEQ ID NO: 1267 - RNA, 21 nt, Homo sapiens
cauacaaucugacauguauuu

SEQ ID NO: 1268 - RNA, 21 nt, Homo sapiens
aaauacaugucagauuguaug

SEQ ID NO: 1269 - RNA, 21 nt, Homo sapiens
auacaugucagauuguaugcc

SEQ ID NO: 1270 - RNA, 21 nt, Homo sapiens
ggcauacaaucugacauguau

SEQ ID NO: 1271 - RNA, 21 nt, Homo sapiens
ucccuccuucuguccccacag

SEQ ID NO: 1272 - RNA, 21 nt, Homo sapiens
cuguggggacagaaggaggga

SEQ ID NO: 1273 - RNA, 22 nt, Homo sapiens
acuggggagcagaaggagaacc

SEQ ID NO: 1274 - RNA, 22 nt, Homo sapiens
gguucuccuucugcuccccagu

SEQ ID NO: 1275 - RNA, 23 nt, Homo sapiens
gaaaauccuuuuuguuuuuccag

SEQ ID NO: 1276 - RNA, 23 nt, Homo sapiens
cuggaaaaacaaaaaggauuuuc

SEQ ID NO: 1277 - RNA, 23 nt, Homo sapiens
agggaaaaaaaaaaggauuuguc

SEQ ID NO: 1278 - RNA, 23 nt, Homo sapiens
gacaaauccuuuuuuuuuucccu

SEQ ID NO: 1279 - RNA, 22 nt, Homo sapiens
uguguccgggaaguggaggagg

SEQ ID NO: 1280 - RNA, 22 nt, Homo sapiens
ccuccuccacuucccggacaca

SEQ ID NO: 1281 - RNA, 22 nt, Homo sapiens
ugaaguuacaucauggucgcuu

SEQ ID NO: 1282 - RNA, 22 nt, Homo sapiens
aagcgaccaugauguaacuuca

SEQ ID NO: 1283 - RNA, 22 nt, Homo sapiens
aagcgaccaugauguaacuuca

SEQ ID NO: 1284 - RNA, 22 nt, Homo sapiens
ugaaguuacaucauggucgcuu

SEQ ID NO: 1285 - RNA, 21 nt, Homo sapiens
uuagugcauagucuuuggucu

SEQ ID NO: 1286 - RNA, 21 nt, Homo sapiens
agaccaaagacuaugcacuaa

SEQ ID NO: 1287 - RNA, 22 nt, Homo sapiens
accgaagacugugcgcuaaucu

SEQ ID NO: 1288 - RNA, 22 nt, Homo sapiens
agauuagcgcacagucuucggu

SEQ ID NO: 1289 - RNA, 21 nt, Homo sapiens
uuacacagcuggacagaggca

SEQ ID NO: 1290 - RNA, 21 nt, Homo sapiens
ugccucuguccagcuguguaa

SEQ ID NO: 1291 - RNA, 22 nt, Homo sapiens
uccaggcaggagccggacugga

SEQ ID NO: 1292 - RNA, 22 nt, Homo sapiens
uccaguccggcuccugccugga

SEQ ID NO: 1293 - RNA, 21 nt, Homo sapiens
cugggcucgggacgcgcggcu

SEQ ID NO: 1294 - RNA, 21 nt, Homo sapiens
agccgcgcgucccgagcccag

SEQ ID NO: 1295 - RNA, 22 nt, Homo sapiens
ggggcugugauugaccagcagg

SEQ ID NO: 1296 - RNA, 22 nt, Homo sapiens
ccugcuggucaaucacagcccc

SEQ ID NO: 1297 - RNA, 22 nt, Homo sapiens
cacuguuucaccacuggcucuu

SEQ ID NO: 1298 - RNA, 22 nt, Homo sapiens
aagagccaguggugaaacagug

SEQ ID NO: 1299 - RNA, 21 nt, Homo sapiens
gagccaguggugagacaguga

SEQ ID NO: 1300 - RNA, 21 nt, Homo sapiens
ucacugucucaccacuggcuc

SEQ ID NO: 1301 - RNA, 22 nt, Homo sapiens
aagguauuguucagacuuauga

SEQ ID NO: 1302 - RNA, 22 nt, Homo sapiens
ucauaagucugaacaauaccuu

SEQ ID NO: 1303 - RNA, 22 nt, Homo sapiens
ucugugauagagauucuuugcu

SEQ ID NO: 1304 - RNA, 22 nt, Homo sapiens
agcaaagaaucucuaucacaga

SEQ ID NO: 1305 - RNA, 21 nt, Homo sapiens
ucugaauuguaagaguuguua

SEQ ID NO: 1306 - RNA, 21 nt, Homo sapiens
uaacaacucuuacaauucaga

SEQ ID NO: 1307 - RNA, 23 nt, Homo sapiens
agaacucuugcagucuuagaugu

SEQ ID NO: 1308 - RNA, 23 nt, Homo sapiens
acaucuaagacugcaagaguucu

SEQ ID NO: 1309 - RNA, 22 nt, Homo sapiens
aacgggaaugcaggcuguaucu

SEQ ID NO: 1310 - RNA, 22 nt, Homo sapiens
agauacagccugcauucccguu

SEQ ID NO: 1311 - RNA, 23 nt, Homo sapiens
ucugaguuccuggagccuggucu

SEQ ID NO: 1312 - RNA, 23 nt, Homo sapiens
agaccaggcuccaggaacucaga

SEQ ID NO: 1313 - RNA, 23 nt, Homo sapiens
uggagauccagugcucgcccgau

SEQ ID NO: 1314 - RNA, 23 nt, Homo sapiens
aucgggcgagcacuggaucucca

SEQ ID NO: 1315 - RNA, 22 nt, Homo sapiens
uguugcaagucgguggagacgu

SEQ ID NO: 1316 - RNA, 22 nt, Homo sapiens
acgucuccaccgacuugcaaca

SEQ ID NO: 1317 - RNA, 22 nt, Homo sapiens
cucucuacugacuugcaacaua

SEQ ID NO: 1318 - RNA, 22 nt, Homo sapiens
uauguugcaagucaguagagag

SEQ ID NO: 1319 - RNA, 22 nt, Homo sapiens
ucucccuuccugcccuggcuag

SEQ ID NO: 1320 - RNA, 22 nt, Homo sapiens
cuagccagggcaggaagggaga

SEQ ID NO: 1321 - RNA, 26 nt, Homo sapiens
cccagggcuuggaguggggcaagguu

SEQ ID NO: 1322 - RNA, 26 nt, Homo sapiens
aaccuugccccacuccaagcccuggg

SEQ ID NO: 1323 - RNA, 23 nt, Homo sapiens
uaucugcugggcuuucugguguu

SEQ ID NO: 1324 - RNA, 23 nt, Homo sapiens
aacaccagaaagcccagcagaua

SEQ ID NO: 1325 - RNA, 21 nt, Homo sapiens
uggcuguuggagggggcaggc

SEQ ID NO: 1326 - RNA, 21 nt, Homo sapiens
gccugcccccuccaacagcca

SEQ ID NO: 1327 - RNA, 22 nt, Homo sapiens
cagcccuccucccgcacccaaa

SEQ ID NO: 1328 - RNA, 22 nt, Homo sapiens
uuugggugcgggaggagggcug

SEQ ID NO: 1329 - RNA, 22 nt, Homo sapiens
uaggggcagcagaggaccuggg

SEQ ID NO: 1330 - RNA, 22 nt, Homo sapiens
cccagguccucugcugccccua

SEQ ID NO: 1331 - RNA, 22 nt, Homo sapiens
uugaggagacauggugggggcc

SEQ ID NO: 1332 - RNA, 22 nt, Homo sapiens
ggcccccaccaugucuccucaa

SEQ ID NO: 1333 - RNA, 21 nt, Homo sapiens
gcagcccagcugaggccucug

SEQ ID NO: 1334 - RNA, 21 nt, Homo sapiens
cagaggccucagcugggcugc

SEQ ID NO: 1335 - RNA, 22 nt, Homo sapiens
gagcaggcgaggcugggcugaa

SEQ ID NO: 1336 - RNA, 22 nt, Homo sapiens
uucagcccagccucgccugcuc

SEQ ID NO: 1337 - RNA, 23 nt, Homo sapiens
ccagccacggacugagagugcau

SEQ ID NO: 1338 - RNA, 23 nt, Homo sapiens
augcacucucaguccguggcugg

SEQ ID NO: 1339 - RNA, 23 nt, Homo sapiens
guccuccaggccaugagcugcgg

SEQ ID NO: 1340 - RNA, 23 nt, Homo sapiens
ccgcagcucauggccuggaggac

SEQ ID NO: 1341 - RNA, 22 nt, Homo sapiens
ucaggcaguguggguaucagau

SEQ ID NO: 1342 - RNA, 22 nt, Homo sapiens
aucugauacccacacugccuga

SEQ ID NO: 1343 - RNA, 23 nt, Homo sapiens
ugagaguggaauucacaguauuu

SEQ ID NO: 1344 - RNA, 23 nt, Homo sapiens
aaauacugugaauuccacucuca

SEQ ID NO: 1345 - RNA, 23 nt, Homo sapiens
auacugugaauuucacugucaca

SEQ ID NO: 1346 - RNA, 23 nt, Homo sapiens
ugugacagugaaauucacaguau

SEQ ID NO: 1347 - RNA, 21 nt, Homo sapiens
caaauggacaggauaacaccu

SEQ ID NO: 1348 - RNA, 21 nt, Homo sapiens
agguguuauccuguccauuug

SEQ ID NO: 1349 - RNA, 22 nt, Homo sapiens
agguguuauccuauccauuugc

SEQ ID NO: 1350 - RNA, 22 nt, Homo sapiens
gcaaauggauaggauaacaccu

SEQ ID NO: 1351 - RNA, 22 nt, Homo sapiens
ugaucucaccgcugccuccuuc

SEQ ID NO: 1352 - RNA, 22 nt, Homo sapiens
gaaggaggcagcggugagauca

SEQ ID NO: 1353 - RNA, 22 nt, Homo sapiens
caggaggcagugggcgagcagg

SEQ ID NO: 1354 - RNA, 22 nt, Homo sapiens
ccugcucgcccacugccuccug

SEQ ID NO: 1355 - RNA, 22 nt, Homo sapiens
ugcaagacggauacugucaucu

SEQ ID NO: 1356 - RNA, 22 nt, Homo sapiens
agaugacaguauccgucuugca

SEQ ID NO: 1357 - RNA, 24 nt, Homo sapiens
ugucagugacuccugccccuuggu

SEQ ID NO: 1358 - RNA, 24 nt, Homo sapiens
accaaggggcaggagucacugaca

SEQ ID NO: 1359 - RNA, 22 nt, Homo sapiens
agggggcgcagucacugacgug

SEQ ID NO: 1360 - RNA, 22 nt, Homo sapiens
cacgucagugacugcgcccccu

SEQ ID NO: 1361 - RNA, 23 nt, Homo sapiens
ucaaaauguagaggaagacccca

SEQ ID NO: 1362 - RNA, 23 nt, Homo sapiens
uggggucuuccucuacauuuuga

SEQ ID NO: 1363 - RNA, 22 nt, Homo sapiens
aauuuacucugcaaucuucucc

SEQ ID NO: 1364 - RNA, 22 nt, Homo sapiens
ggagaagauugcagaguaaauu

SEQ ID NO: 1365 - RNA, 22 nt, Homo sapiens
agaagauugcagaguaaguucc

SEQ ID NO: 1366 - RNA, 22 nt, Homo sapiens
ggaacuuacucugcaaucuucu

SEQ ID NO: 1367 - RNA, 26 nt, Homo sapiens
cacaggacugacuccucaccccagug

SEQ ID NO: 1368 - RNA, 26 nt, Homo sapiens
cacuggggugaggagucaguccugug

SEQ ID NO: 1369 - RNA, 22 nt, Homo sapiens
ucuggggaugaggacagugugu

SEQ ID NO: 1370 - RNA, 22 nt, Homo sapiens
acacacuguccucauccccaga

SEQ ID NO: 1371 - RNA, 20 nt, Homo sapiens
augggugauggguguggugu

SEQ ID NO: 1372 - RNA, 20 nt, Homo sapiens
acaccacacccaucacccau

SEQ ID NO: 1373 - RNA, 22 nt, Homo sapiens
uuggccaccacaccuaccccuu

SEQ ID NO: 1374 - RNA, 22 nt, Homo sapiens
aagggguaggugugguggccaa

SEQ ID NO: 1375 - RNA, 22 nt, Homo sapiens
uguaguuguauuguauugccac

SEQ ID NO: 1376 - RNA, 22 nt, Homo sapiens
guggcaauacaauacaacuaca

SEQ ID NO: 1377 - RNA, 23 nt, Homo sapiens
uagcaauacaguacaaauauagu

SEQ ID NO: 1378 - RNA, 23 nt, Homo sapiens
acuauauuuguacuguauugcua

SEQ ID NO: 1379 - RNA, 22 nt, Homo sapiens
ucagucacauaucuagugucua

SEQ ID NO: 1380 - RNA, 22 nt, Homo sapiens
uagacacuagauaugugacuga

SEQ ID NO: 1381 - RNA, 22 nt, Homo sapiens
gacacuaggcaugugagugauu

SEQ ID NO: 1382 - RNA, 22 nt, Homo sapiens
aaucacucacaugccuaguguc

SEQ ID NO: 1383 - RNA, 22 nt, Homo sapiens
ucaaucacuugguaauugcugu

SEQ ID NO: 1384 - RNA, 22 nt, Homo sapiens
acagcaauuaccaagugauuga

SEQ ID NO: 1385 - RNA, 25 nt, Homo sapiens
agcggggaggaagugggcgcugcuu

SEQ ID NO: 1386 - RNA, 25 nt, Homo sapiens
aagcagcgcccacuuccuccccgcu

SEQ ID NO: 1387 - RNA, 22 nt, Homo sapiens
agcccgccccagccgagguucu

SEQ ID NO: 1388 - RNA, 22 nt, Homo sapiens
agaaccucggcuggggcgggcu

SEQ ID NO: 1389 - RNA, 23 nt, Homo sapiens
gccccggcgcgggcggguucugg

SEQ ID NO: 1390 - RNA, 23 nt, Homo sapiens
ccagaacccgcccgcgccggggc

SEQ ID NO: 1391 - RNA, 22 nt, Homo sapiens
agcaaggcggcaucucucugau

SEQ ID NO: 1392 - RNA, 22 nt, Homo sapiens
aucagagagaugccgccuugcu

SEQ ID NO: 1393 - RNA, 21 nt, Homo sapiens
agagaugccgccuugcuccuu

SEQ ID NO: 1394 - RNA, 21 nt, Homo sapiens
aaggagcaaggcggcaucucu

SEQ ID NO: 1395 - RNA, 23 nt, Homo sapiens
uugaagaggaggugcucuguagc

SEQ ID NO: 1396 - RNA, 23 nt, Homo sapiens
gcuacagagcaccuccucuucaa

SEQ ID NO: 1397 - RNA, 22 nt, Homo sapiens
acaacagugacuugcucuccaa

SEQ ID NO: 1398 - RNA, 22 nt, Homo sapiens
uuggagagcaagucacuguugu

SEQ ID NO: 1399 - RNA, 18 nt, Homo sapiens
gggugagggcaggugguu

SEQ ID NO: 1400 - RNA, 18 nt, Homo sapiens
aaccaccugcccucaccc

SEQ ID NO: 1401 - RNA, 18 nt, Homo sapiens
cgugucuucuggcuugau

SEQ ID NO: 1402 - RNA, 18 nt, Homo sapiens
aucaagccagaagacacg

SEQ ID NO: 1403 - RNA, 23 nt, Homo sapiens
ugcaucaggccagaagacaugag

SEQ ID NO: 1404 - RNA, 23 nt, Homo sapiens
cucaugucuucuggccugaugca

SEQ ID NO: 1405 - RNA, 21 nt, Homo sapiens
aaugagagaccuguacuguau

SEQ ID NO: 1406 - RNA, 21 nt, Homo sapiens
auacaguacaggucucucauu

SEQ ID NO: 1407 - RNA, 22 nt, Homo sapiens
uccaguacaggucucucauuuc

SEQ ID NO: 1408 - RNA, 22 nt, Homo sapiens
gaaaugagagaccuguacugga

SEQ ID NO: 1409 - RNA, 22 nt, Homo sapiens
ugggauccagacagugggagaa

SEQ ID NO: 1410 - RNA, 22 nt, Homo sapiens
uucucccacugucuggauccca

SEQ ID NO: 1411 - RNA, 22 nt, Homo sapiens
uucucccacuaccaggcuccca

SEQ ID NO: 1412 - RNA, 22 nt, Homo sapiens
ugggagccugguagugggagaa

SEQ ID NO: 1413 - RNA, 22 nt, Homo sapiens
ccaaccuagguggucagaguug

SEQ ID NO: 1414 - RNA, 22 nt, Homo sapiens
caacucugaccaccuagguugg

SEQ ID NO: 1415 - RNA, 22 nt, Homo sapiens
aacucugaccccuuagguugau

SEQ ID NO: 1416 - RNA, 22 nt, Homo sapiens
aucaaccuaaggggucagaguu

SEQ ID NO: 1417 - RNA, 23 nt, Homo sapiens
gugccaccuuaacugcagccaau

SEQ ID NO: 1418 - RNA, 23 nt, Homo sapiens
auuggcugcaguuaagguggcac

SEQ ID NO: 1419 - RNA, 22 nt, Homo sapiens
aaguuggcugcaguuaaggugg

SEQ ID NO: 1420 - RNA, 22 nt, Homo sapiens
ccaccuuaacugcagccaacuu

SEQ ID NO: 1421 - RNA, 22 nt, Homo sapiens
aagggggaaggaaacauggaga

SEQ ID NO: 1422 - RNA, 22 nt, Homo sapiens
ucuccauguuuccuucccccuu

SEQ ID NO: 1423 - RNA, 22 nt, Homo sapiens
uccauguuuccuucccccuucu

SEQ ID NO: 1424 - RNA, 22 nt, Homo sapiens
agaagggggaaggaaacaugga

SEQ ID NO: 1425 - RNA, 21 nt, Homo sapiens
acacauggguggcuguggccu

SEQ ID NO: 1426 - RNA, 21 nt, Homo sapiens
aggccacagccacccaugugu

SEQ ID NO: 1427 - RNA, 22 nt, Homo sapiens
uaggccacagccacccaugugu

SEQ ID NO: 1428 - RNA, 22 nt, Homo sapiens
acacauggguggcuguggccua

SEQ ID NO: 1429 - RNA, 21 nt, Homo sapiens
agcuguaccugaaaccaagca

SEQ ID NO: 1430 - RNA, 21 nt, Homo sapiens
ugcuugguuucagguacagcu

SEQ ID NO: 1431 - RNA, 22 nt, Homo sapiens
ucacaaaucuauaauaugcagg

SEQ ID NO: 1432 - RNA, 22 nt, Homo sapiens
ccugcauauuauagauuuguga

SEQ ID NO: 1433 - RNA, 21 nt, Homo sapiens
ugcuuaaguuguaccaaguau

SEQ ID NO: 1434 - RNA, 21 nt, Homo sapiens
auacuugguacaacuuaagca

SEQ ID NO: 1435 - RNA, 22 nt, Homo sapiens
ccuggcauauuugguauaacuu

SEQ ID NO: 1436 - RNA, 22 nt, Homo sapiens
aaguuauaccaaauaugccagg

SEQ ID NO: 1437 - RNA, 22 nt, Homo sapiens
ugagggcuccaggugacggugg

SEQ ID NO: 1438 - RNA, 22 nt, Homo sapiens
ccaccgucaccuggagcccuca

SEQ ID NO: 1439 - RNA, 22 nt, Homo sapiens
accugccagcaccucccugcag

SEQ ID NO: 1440 - RNA, 22 nt, Homo sapiens
cugcagggaggugcuggcaggu

SEQ ID NO: 1441 - RNA, 23 nt, Homo sapiens
ggcaggagggcugugccagguug

SEQ ID NO: 1442 - RNA, 23 nt, Homo sapiens
caaccuggcacagcccuccugcc

SEQ ID NO: 1443 - RNA, 22 nt, Homo sapiens
cccucucuggcuccuccccaaa

SEQ ID NO: 1444 - RNA, 22 nt, Homo sapiens
uuuggggaggagccagagaggg

SEQ ID NO: 1445 - RNA, 24 nt, Homo sapiens
ugggggagccaugagauaagagca

SEQ ID NO: 1446 - RNA, 24 nt, Homo sapiens
ugcucuuaucucauggcuccccca

SEQ ID NO: 1447 - RNA, 21 nt, Homo sapiens
guaccuucugguucagcuagu

SEQ ID NO: 1448 - RNA, 21 nt, Homo sapiens
acuagcugaaccagaagguac

SEQ ID NO: 1449 - RNA, 23 nt, Homo sapiens
aacugaaccaggagugagcuucg

SEQ ID NO: 1450 - RNA, 23 nt, Homo sapiens
cgaagcucacuccugguucaguu

SEQ ID NO: 1451 - RNA, 22 nt, Homo sapiens
uggggaaggcgucagugucggg

SEQ ID NO: 1452 - RNA, 22 nt, Homo sapiens
cccgacacugacgccuucccca

SEQ ID NO: 1453 - RNA, 21 nt, Homo sapiens
agacccugcagccuucccacc

SEQ ID NO: 1454 - RNA, 21 nt, Homo sapiens
ggugggaaggcugcagggucu

SEQ ID NO: 1455 - RNA, 22 nt, Homo sapiens
acccagguucccucuggccgca

SEQ ID NO: 1456 - RNA, 22 nt, Homo sapiens
ugcggccagagggaaccugggu

SEQ ID NO: 1457 - RNA, 23 nt, Homo sapiens
agggccagaggagccuggagugg

SEQ ID NO: 1458 - RNA, 23 nt, Homo sapiens
ccacuccaggcuccucuggcccu

SEQ ID NO: 1459 - RNA, 22 nt, Homo sapiens
auagugggaagcuggcagauuc

SEQ ID NO: 1460 - RNA, 22 nt, Homo sapiens
gaaucugccagcuucccacuau

SEQ ID NO: 1461 - RNA, 21 nt, Homo sapiens
aucugccagcuuccacagugg

SEQ ID NO: 1462 - RNA, 21 nt, Homo sapiens
ccacuguggaagcuggcagau

SEQ ID NO: 1463 - RNA, 25 nt, Homo sapiens
caugcugaccucccuccugccccag

SEQ ID NO: 1464 - RNA, 25 nt, Homo sapiens
cuggggcaggagggaggucagcaug

SEQ ID NO: 1465 - RNA, 23 nt, Homo sapiens
ugggaggggagaggcagcaagca

SEQ ID NO: 1466 - RNA, 23 nt, Homo sapiens
ugcuugcugccucuccccuccca

SEQ ID NO: 1467 - RNA, 22 nt, Homo sapiens
ucauuuaucuguugggaagcua

SEQ ID NO: 1468 - RNA, 22 nt, Homo sapiens
uagcuucccaacagauaaauga

SEQ ID NO: 1469 - RNA, 23 nt, Homo sapiens
cuggcggagcccauuccaugcca

SEQ ID NO: 1470 - RNA, 23 nt, Homo sapiens
uggcauggaaugggcuccgccag

SEQ ID NO: 1471 - RNA, 22 nt, Homo sapiens
cacacaaguggcccccaacacu

SEQ ID NO: 1472 - RNA, 22 nt, Homo sapiens
aguguugggggccacuugugug

SEQ ID NO: 1473 - RNA, 22 nt, Homo sapiens
ugcugggggccacaugagugug

SEQ ID NO: 1474 - RNA, 22 nt, Homo sapiens
cacacucauguggcccccagca

SEQ ID NO: 1475 - RNA, 21 nt, Homo sapiens
gcccugaccuguccuguucug

SEQ ID NO: 1476 - RNA, 21 nt, Homo sapiens
cagaacaggacaggucagggc

SEQ ID NO: 1477 - RNA, 23 nt, Homo sapiens
uguagagcagggagcaggaagcu

SEQ ID NO: 1478 - RNA, 23 nt, Homo sapiens
agcuuccugcucccugcucuaca

SEQ ID NO: 1479 - RNA, 22 nt, Homo sapiens
ccaccaggucuagcauugggau

SEQ ID NO: 1480 - RNA, 22 nt, Homo sapiens
aucccaaugcuagaccuggugg

SEQ ID NO: 1481 - RNA, 22 nt, Homo sapiens
aaucccaaugcuagacccggug

SEQ ID NO: 1482 - RNA, 22 nt, Homo sapiens
caccgggucuagcauugggauu

SEQ ID NO: 1483 - RNA, 22 nt, Homo sapiens
gcugcgggcugcggucagggcg

SEQ ID NO: 1484 - RNA, 22 nt, Homo sapiens
cgcccugaccgcagcccgcagc

SEQ ID NO: 1485 - RNA, 21 nt, Homo sapiens
aaaggugcucaaauuagacau

SEQ ID NO: 1486 - RNA, 21 nt, Homo sapiens
augucuaauuugagcaccuuu

SEQ ID NO: 1487 - RNA, 22 nt, Homo sapiens
ccuaauuugaacaccuucggua

SEQ ID NO: 1488 - RNA, 22 nt, Homo sapiens
uaccgaagguguucaaauuagg

SEQ ID NO: 1489 - RNA, 19 nt, Homo sapiens
aggcagguuaucugggcug

SEQ ID NO: 1490 - RNA, 19 nt, Homo sapiens
cagcccagauaaccugccu

SEQ ID NO: 1491 - RNA, 20 nt, Homo sapiens
augcgaggaugcugacagug

SEQ ID NO: 1492 - RNA, 20 nt, Homo sapiens
cacugucagcauccucgcau

SEQ ID NO: 1493 - RNA, 22 nt, Homo sapiens
ugaaacuggagcgccuggagga

SEQ ID NO: 1494 - RNA, 22 nt, Homo sapiens
uccuccaggcgcuccaguuuca

SEQ ID NO: 1495 - RNA, 22 nt, Homo sapiens
accagcgcguuuucaguuucau

SEQ ID NO: 1496 - RNA, 22 nt, Homo sapiens
augaaacugaaaacgcgcuggu

SEQ ID NO: 1497 - RNA, 25 nt, Homo sapiens
aagggaggaggagcggaggggcccu

SEQ ID NO: 1498 - RNA, 25 nt, Homo sapiens
agggccccuccgcuccuccucccuu

SEQ ID NO: 1499 - RNA, 22 nt, Homo sapiens
gcccgagaggauccgucccugc

SEQ ID NO: 1500 - RNA, 22 nt, Homo sapiens
gcagggacggauccucucgggc

SEQ ID NO: 1501 - RNA, 22 nt, Homo sapiens
aggacugauccucucgggcagg

SEQ ID NO: 1502 - RNA, 22 nt, Homo sapiens
ccugcccgagaggaucaguccu

SEQ ID NO: 1503 - RNA, 23 nt, Homo sapiens
ucaggcaaagggauauuuacaga

SEQ ID NO: 1504 - RNA, 23 nt, Homo sapiens
ucuguaaauaucccuuugccuga

SEQ ID NO: 1505 - RNA, 21 nt, Homo sapiens
uuucugucuuuucugguccag

SEQ ID NO: 1506 - RNA, 21 nt, Homo sapiens
cuggaccagaaaagacagaaa

SEQ ID NO: 1507 - RNA, 23 nt, Homo sapiens
uggccggaugggacaggaggcau

SEQ ID NO: 1508 - RNA, 23 nt, Homo sapiens
augccuccugucccauccggcca

SEQ ID NO: 1509 - RNA, 23 nt, Homo sapiens
ucuaaagacuagacuucgcuaug

SEQ ID NO: 1510 - RNA, 23 nt, Homo sapiens
cauagcgaagucuagucuuuaga

SEQ ID NO: 1511 - RNA, 23 nt, Homo sapiens
uggcccggcgacgucucacgguc

SEQ ID NO: 1512 - RNA, 23 nt, Homo sapiens
gaccgugagacgucgccgggcca

SEQ ID NO: 1513 - RNA, 23 nt, Homo sapiens
ugaguggggcucccgggacggcg

SEQ ID NO: 1514 - RNA, 23 nt, Homo sapiens
cgccgucccgggagccccacuca

SEQ ID NO: 1515 - RNA, 21 nt, Homo sapiens
agcggugcuccugcgggccga

SEQ ID NO: 1516 - RNA, 21 nt, Homo sapiens
ucggcccgcaggagcaccgcu

SEQ ID NO: 1517 - RNA, 23 nt, Homo sapiens
ccggucccaggagaaccugcaga

SEQ ID NO: 1518 - RNA, 23 nt, Homo sapiens
ucugcagguucuccugggaccgg

SEQ ID NO: 1519 - RNA, 22 nt, Homo sapiens
aaggcccgggcuuuccucccag

SEQ ID NO: 1520 - RNA, 22 nt, Homo sapiens
cugggaggaaagcccgggccuu

SEQ ID NO: 1521 - RNA, 22 nt, Homo sapiens
agggaaggaggcuuggucuuag

SEQ ID NO: 1522 - RNA, 22 nt, Homo sapiens
cuaagaccaagccuccuucccu

SEQ ID NO: 1523 - RNA, 21 nt, Homo sapiens
gagguuuggggaggauuugcu

SEQ ID NO: 1524 - RNA, 21 nt, Homo sapiens
agcaaauccuccccaaaccuc

SEQ ID NO: 1525 - RNA, 20 nt, Homo sapiens
cgccccuccugcccccacag

SEQ ID NO: 1526 - RNA, 20 nt, Homo sapiens
cugugggggcaggaggggcg

SEQ ID NO: 1527 - RNA, 22 nt, Homo sapiens
ugcggggacaggccagggcauc

SEQ ID NO: 1528 - RNA, 22 nt, Homo sapiens
gaugcccuggccuguccccgca

SEQ ID NO: 1529 - RNA, 22 nt, Homo sapiens
ccugacccacccccucccgcag

SEQ ID NO: 1530 - RNA, 22 nt, Homo sapiens
cugcgggagggggugggucagg

SEQ ID NO: 1531 - RNA, 22 nt, Homo sapiens
cucgggcggaggugguugagug

SEQ ID NO: 1532 - RNA, 22 nt, Homo sapiens
cacucaaccaccuccgcccgag

SEQ ID NO: 1533 - RNA, 24 nt, Homo sapiens
agaggacccguagcugcuagaagg

SEQ ID NO: 1534 - RNA, 24 nt, Homo sapiens
ccuucuagcagcuacggguccucu

SEQ ID NO: 1535 - RNA, 22 nt, Homo sapiens
uuguggaucucaaggaugugcu

SEQ ID NO: 1536 - RNA, 22 nt, Homo sapiens
agcacauccuugagauccacaa

SEQ ID NO: 1537 - RNA, 22 nt, Homo sapiens
uucucuuucuuuagccuugugu

SEQ ID NO: 1538 - RNA, 22 nt, Homo sapiens
acacaaggcuaaagaaagagaa

SEQ ID NO: 1539 - RNA, 22 nt, Homo sapiens
caaggccaaaggaagagaacag

SEQ ID NO: 1540 - RNA, 22 nt, Homo sapiens
cuguucucuuccuuuggccuug

SEQ ID NO: 1541 - RNA, 23 nt, Homo sapiens
augcggaccuggguuagcggagu

SEQ ID NO: 1542 - RNA, 23 nt, Homo sapiens
acuccgcuaacccagguccgcau

SEQ ID NO: 1543 - RNA, 22 nt, Homo sapiens
agccaggcucugaagggaaagu

SEQ ID NO: 1544 - RNA, 22 nt, Homo sapiens
acuuucccuucagagccuggcu

SEQ ID NO: 1545 - RNA, 22 nt, Homo sapiens
uuucccuucagagccuggcuuu

SEQ ID NO: 1546 - RNA, 22 nt, Homo sapiens
aaagccaggcucugaagggaaa

SEQ ID NO: 1547 - RNA, 22 nt, Homo sapiens
ccagagaugguugccuuccuau

SEQ ID NO: 1548 - RNA, 22 nt, Homo sapiens
auaggaaggcaaccaucucugg

SEQ ID NO: 1549 - RNA, 23 nt, Homo sapiens
cagggaggcgcucacucucugcu

SEQ ID NO: 1550 - RNA, 23 nt, Homo sapiens
agcagagagugagcgccucccug

SEQ ID NO: 1551 - RNA, 22 nt, Homo sapiens
caugacgucacagaggcuucgc

SEQ ID NO: 1552 - RNA, 22 nt, Homo sapiens
gcgaagccucugugacgucaug

SEQ ID NO: 1553 - RNA, 23 nt, Homo sapiens
aggccucugugacgucacggugu

SEQ ID NO: 1554 - RNA, 23 nt, Homo sapiens
acaccgugacgucacagaggccu

SEQ ID NO: 1555 - RNA, 23 nt, Homo sapiens
ugccccaccugcugaccacccuc

SEQ ID NO: 1556 - RNA, 23 nt, Homo sapiens
gaggguggucagcagguggggca

SEQ ID NO: 1557 - RNA, 23 nt, Homo sapiens
gugagugggagccgguggggcug

SEQ ID NO: 1558 - RNA, 23 nt, Homo sapiens
cagccccaccggcucccacucac

SEQ ID NO: 1559 - RNA, 21 nt, Homo sapiens
uaggacuagauguuggaauua

SEQ ID NO: 1560 - RNA, 21 nt, Homo sapiens
uaauuccaacaucuaguccua

SEQ ID NO: 1561 - RNA, 22 nt, Homo sapiens
aaauucauguucaaucuaaacc

SEQ ID NO: 1562 - RNA, 22 nt, Homo sapiens
gguuuagauugaacaugaauuu

SEQ ID NO: 1563 - RNA, 22 nt, Homo sapiens
uuuagauugaacaugaaguuag

SEQ ID NO: 1564 - RNA, 22 nt, Homo sapiens
cuaacuucauguucaaucuaaa

SEQ ID NO: 1565 - RNA, 21 nt, Homo sapiens
gagggcaugcgcacuuugucc

SEQ ID NO: 1566 - RNA, 21 nt, Homo sapiens
ggacaaagugcgcaugcccuc

SEQ ID NO: 1567 - RNA, 21 nt, Homo sapiens
acaaggugugcaugccugacc

SEQ ID NO: 1568 - RNA, 21 nt, Homo sapiens
ggucaggcaugcacaccuugu

SEQ ID NO: 1569 - RNA, 22 nt, Homo sapiens
cuucugaucaagauuuguggug

SEQ ID NO: 1570 - RNA, 22 nt, Homo sapiens
caccacaaaucuugaucagaag

SEQ ID NO: 1571 - RNA, 21 nt, Homo sapiens
ccaaaucuugaucagaagccu

SEQ ID NO: 1572 - RNA, 21 nt, Homo sapiens
aggcuucugaucaagauuugg

SEQ ID NO: 1573 - RNA, 24 nt, Homo sapiens
aggcaggggcuggugcugggcggg

SEQ ID NO: 1574 - RNA, 24 nt, Homo sapiens
cccgcccagcaccagccccugccu

SEQ ID NO: 1575 - RNA, 21 nt, Homo sapiens
cgccugcccagcccuccugcu

SEQ ID NO: 1576 - RNA, 21 nt, Homo sapiens
agcaggagggcugggcaggcg

SEQ ID NO: 1577 - RNA, 22 nt, Homo sapiens
uuaacuccuuucacacccaugg

SEQ ID NO: 1578 - RNA, 22 nt, Homo sapiens
ccaugggugugaaaggaguuaa

SEQ ID NO: 1579 - RNA, 21 nt, Homo sapiens
uggauguggaaggaguuaucu

SEQ ID NO: 1580 - RNA, 21 nt, Homo sapiens
agauaacuccuuccacaucca

SEQ ID NO: 1581 - RNA, 22 nt, Homo sapiens
ugagugauugauagcuauguuc

SEQ ID NO: 1582 - RNA, 22 nt, Homo sapiens
gaacauagcuaucaaucacuca

SEQ ID NO: 1583 - RNA, 21 nt, Homo sapiens
auagcaauugcucuuuuggaa

SEQ ID NO: 1584 - RNA, 21 nt, Homo sapiens
uuccaaaagagcaauugcuau

SEQ ID NO: 1585 - RNA, 21 nt, Homo sapiens
ucugaaagagcaguugguguu

SEQ ID NO: 1586 - RNA, 21 nt, Homo sapiens
aacaccaacugcucuuucaga

SEQ ID NO: 1587 - RNA, 23 nt, Homo sapiens
cgcgggcgcuccuggccgccgcc

SEQ ID NO: 1588 - RNA, 23 nt, Homo sapiens
ggcggcggccaggagcgcccgcg

SEQ ID NO: 1589 - RNA, 20 nt, Homo sapiens
ccaggagauccagagagaau

SEQ ID NO: 1590 - RNA, 20 nt, Homo sapiens
auucucucuggaucuccugg

SEQ ID NO: 1591 - RNA, 22 nt, Homo sapiens
auucucucuggaucccauggau

SEQ ID NO: 1592 - RNA, 22 nt, Homo sapiens
auccaugggauccagagagaau

SEQ ID NO: 1593 - RNA, 22 nt, Homo sapiens
ucugccauccucccuccccuac

SEQ ID NO: 1594 - RNA, 22 nt, Homo sapiens
guaggggagggaggauggcaga

SEQ ID NO: 1595 - RNA, 24 nt, Homo sapiens
ggugggauggagagaagguaugag

SEQ ID NO: 1596 - RNA, 24 nt, Homo sapiens
cucauaccuucucuccaucccacc

SEQ ID NO: 1597 - RNA, 18 nt, Homo sapiens
ugagaugacacuguagcu

SEQ ID NO: 1598 - RNA, 18 nt, Homo sapiens
agcuacagugucaucuca

SEQ ID NO: 1599 - RNA, 21 nt, Homo sapiens
agcagacuugaccuacaauua

SEQ ID NO: 1600 - RNA, 21 nt, Homo sapiens
uaauuguaggucaagucugcu

SEQ ID NO: 1601 - RNA, 22 nt, Homo sapiens
cagaacaggagcauagaaaggc

SEQ ID NO: 1602 - RNA, 22 nt, Homo sapiens
gccuuucuaugcuccuguucug

SEQ ID NO: 1603 - RNA, 22 nt, Homo sapiens
uuaauuuuuuguuucggucacu

SEQ ID NO: 1604 - RNA, 22 nt, Homo sapiens
agugaccgaaacaaaaaauuaa

SEQ ID NO: 1605 - RNA, 23 nt, Homo sapiens
cuugccauccugguccacugcau

SEQ ID NO: 1606 - RNA, 23 nt, Homo sapiens
augcaguggaccaggauggcaag

SEQ ID NO: 1607 - RNA, 22 nt, Homo sapiens
guggaccaggauggcaagggcu

SEQ ID NO: 1608 - RNA, 22 nt, Homo sapiens
agcccuugccauccugguccac

SEQ ID NO: 1609 - RNA, 22 nt, Homo sapiens
auaccucaucuagaaugcugua

SEQ ID NO: 1610 - RNA, 22 nt, Homo sapiens
uacagcauucuagaugagguau

SEQ ID NO: 1611 - RNA, 22 nt, Homo sapiens
uucuagaugagagauauauaua

SEQ ID NO: 1612 - RNA, 22 nt, Homo sapiens
uauauauaucucucaucuagaa

SEQ ID NO: 1613 - RNA, 22 nt, Homo sapiens
ucuucuuccuuugcagaguuga

SEQ ID NO: 1614 - RNA, 22 nt, Homo sapiens
ucaacucugcaaaggaagaaga

SEQ ID NO: 1615 - RNA, 22 nt, Homo sapiens
aauucuguaaaggaagaagagg

SEQ ID NO: 1616 - RNA, 22 nt, Homo sapiens
ccucuucuuccuuuacagaauu

SEQ ID NO: 1617 - RNA, 22 nt, Homo sapiens
uaggagggaauaguaaaagcag

SEQ ID NO: 1618 - RNA, 22 nt, Homo sapiens
cugcuuuuacuauucccuccua

SEQ ID NO: 1619 - RNA, 22 nt, Homo sapiens
acccuugagccugaucccuagc

SEQ ID NO: 1620 - RNA, 22 nt, Homo sapiens
gcuagggaucaggcucaagggu

SEQ ID NO: 1621 - RNA, 22 nt, Homo sapiens
aauguuggaauccucgcuagag

SEQ ID NO: 1622 - RNA, 22 nt, Homo sapiens
cucuagcgaggauuccaacauu

SEQ ID NO: 1623 - RNA, 21 nt, Homo sapiens
uagcggggauuccaauauugg

SEQ ID NO: 1624 - RNA, 21 nt, Homo sapiens
ccaauauuggaauccccgcua

SEQ ID NO: 1625 - RNA, 22 nt, Homo sapiens
ugauugucuucauaucuagaac

SEQ ID NO: 1626 - RNA, 22 nt, Homo sapiens
guucuagauaugaagacaauca

SEQ ID NO: 1627 - RNA, 22 nt, Homo sapiens
uucuggauaugaagacaaucaa

SEQ ID NO: 1628 - RNA, 22 nt, Homo sapiens
uugauugucuucauauccagaa

SEQ ID NO: 1629 - RNA, 23 nt, Homo sapiens
ccccgguguuggggcgcgucugc

SEQ ID NO: 1630 - RNA, 23 nt, Homo sapiens
gcagacgcgccccaacaccgggg

SEQ ID NO: 1631 - RNA, 21 nt, Homo sapiens
ggcgcgcccagcucccgggcu

SEQ ID NO: 1632 - RNA, 21 nt, Homo sapiens
agcccgggagcugggcgcgcc

SEQ ID NO: 1633 - RNA, 20 nt, Homo sapiens
ugaggagaugcugggacuga

SEQ ID NO: 1634 - RNA, 20 nt, Homo sapiens
ucagucccagcaucuccuca

SEQ ID NO: 1635 - RNA, 21 nt, Homo sapiens
agagucggcgacgccgccagc

SEQ ID NO: 1636 - RNA, 21 nt, Homo sapiens
gcuggcggcgucgccgacucu

SEQ ID NO: 1637 - RNA, 22 nt, Homo sapiens
ugaagccagcucuggucugggc

SEQ ID NO: 1638 - RNA, 22 nt, Homo sapiens
gcccagaccagagcuggcuuca

SEQ ID NO: 1639 - RNA, 22 nt, Homo sapiens
ugagaccaggacuggaugcacc

SEQ ID NO: 1640 - RNA, 22 nt, Homo sapiens
ggugcauccaguccuggucuca

SEQ ID NO: 1641 - RNA, 24 nt, Homo sapiens
gaugcgccgcccacugccccgcgc

SEQ ID NO: 1642 - RNA, 24 nt, Homo sapiens
gcgcggggcagugggcggcgcauc

SEQ ID NO: 1643 - RNA, 22 nt, Homo sapiens
gcggggguggcggcggcauccc

SEQ ID NO: 1644 - RNA, 22 nt, Homo sapiens
gggaugccgccgccacccccgc

SEQ ID NO: 1645 - RNA, 22 nt, Homo sapiens
uuacggaccagcuaagggaggc

SEQ ID NO: 1646 - RNA, 22 nt, Homo sapiens
gccucccuuagcugguccguaa

SEQ ID NO: 1647 - RNA, 21 nt, Homo sapiens
cacacauagcagguguauaua

SEQ ID NO: 1648 - RNA, 21 nt, Homo sapiens
uauauacaccugcuaugugug

SEQ ID NO: 1649 - RNA, 22 nt, Homo sapiens
guauacaccugauauguguaug

SEQ ID NO: 1650 - RNA, 22 nt, Homo sapiens
cauacacauaucagguguauac

SEQ ID NO: 1651 - RNA, 22 nt, Homo sapiens
ugaaugguaaagcgaugucaca

SEQ ID NO: 1652 - RNA, 22 nt, Homo sapiens
ugugacaucgcuuuaccauuca

SEQ ID NO: 1653 - RNA, 20 nt, Homo sapiens
aucgcuuuaccauucauguu

SEQ ID NO: 1654 - RNA, 20 nt, Homo sapiens
aacaugaaugguaaagcgau

SEQ ID NO: 1655 - RNA, 18 nt, Homo sapiens
uggauaugaugacugaaa

SEQ ID NO: 1656 - RNA, 18 nt, Homo sapiens
uuucagucaucauaucca

SEQ ID NO: 1657 - RNA, 18 nt, Homo sapiens
cggugagcgcucgcuggc

SEQ ID NO: 1658 - RNA, 18 nt, Homo sapiens
gccagcgagcgcucaccg

SEQ ID NO: 1659 - RNA, 23 nt, Homo sapiens
ucugcacugugaguuggcuggcu

SEQ ID NO: 1660 - RNA, 23 nt, Homo sapiens
agccagccaacucacagugcaga

SEQ ID NO: 1661 - RNA, 24 nt, Homo sapiens
acauccugcuccacagggcagagg

SEQ ID NO: 1662 - RNA, 24 nt, Homo sapiens
ccucugcccuguggagcaggaugu

SEQ ID NO: 1663 - RNA, 22 nt, Homo sapiens
ucuggcuaucucacgagacugu

SEQ ID NO: 1664 - RNA, 22 nt, Homo sapiens
acagucucgugagauagccaga

SEQ ID NO: 1665 - RNA, 22 nt, Homo sapiens
auauuauuagccacuucuggau

SEQ ID NO: 1666 - RNA, 22 nt, Homo sapiens
auccagaaguggcuaauaauau

SEQ ID NO: 1667 - RNA, 21 nt, Homo sapiens
agaaguggcuaauaauauuga

SEQ ID NO: 1668 - RNA, 21 nt, Homo sapiens
ucaauauuauuagccacuucu

SEQ ID NO: 1669 - RNA, 22 nt, Homo sapiens
uaaaguggcagaguauagacac

SEQ ID NO: 1670 - RNA, 22 nt, Homo sapiens
gugucuauacucugccacuuua

SEQ ID NO: 1671 - RNA, 22 nt, Homo sapiens
ugucuauacucugucacuuuac

SEQ ID NO: 1672 - RNA, 22 nt, Homo sapiens
guaaagugacagaguauagaca

SEQ ID NO: 1673 - RNA, 21 nt, Homo sapiens
ucucaguaaguggcacucugu

SEQ ID NO: 1674 - RNA, 21 nt, Homo sapiens
acagagugccacuuacugaga

SEQ ID NO: 1675 - RNA, 21 nt, Homo sapiens
gacagagugccacuuacugaa

SEQ ID NO: 1676 - RNA, 21 nt, Homo sapiens
uucaguaaguggcacucuguc

SEQ ID NO: 1677 - RNA, 22 nt, Homo sapiens
aacucacgaaguauaccgaagu

SEQ ID NO: 1678 - RNA, 22 nt, Homo sapiens
acuucgguauacuucgugaguu

SEQ ID NO: 1679 - RNA, 22 nt, Homo sapiens
uucgguauacuuugugaauugg

SEQ ID NO: 1680 - RNA, 22 nt, Homo sapiens
ccaauucacaaaguauaccgaa

SEQ ID NO: 1681 - RNA, 22 nt, Homo sapiens
acuggcaugcugcauuuauaua

SEQ ID NO: 1682 - RNA, 22 nt, Homo sapiens
uauauaaaugcagcaugccagu

SEQ ID NO: 1683 - RNA, 22 nt, Homo sapiens
aucuaaaugcagcaugccaguc

SEQ ID NO: 1684 - RNA, 22 nt, Homo sapiens
gacuggcaugcugcauuuagau

SEQ ID NO: 1685 - RNA, 19 nt, Homo sapiens
cauccguccgucuguccac

SEQ ID NO: 1686 - RNA, 19 nt, Homo sapiens
guggacagacggacggaug

SEQ ID NO: 1687 - RNA, 21 nt, Homo sapiens
aguggaccgaggaaggaagga

SEQ ID NO: 1688 - RNA, 21 nt, Homo sapiens
uccuuccuuccucgguccacu

SEQ ID NO: 1689 - RNA, 22 nt, Homo sapiens
uacacaagaaaaccaaggcuca

SEQ ID NO: 1690 - RNA, 22 nt, Homo sapiens
ugagccuugguuuucuugugua

SEQ ID NO: 1691 - RNA, 21 nt, Homo sapiens
uaacauaauaguguggauuga

SEQ ID NO: 1692 - RNA, 21 nt, Homo sapiens
ucaauccacacuauuauguua

SEQ ID NO: 1693 - RNA, 21 nt, Homo sapiens
ugcuuaaccuugcccucgaaa

SEQ ID NO: 1694 - RNA, 21 nt, Homo sapiens
uuucgagggcaagguuaagca

SEQ ID NO: 1695 - RNA, 21 nt, Homo sapiens
uuggacgguaagguuaagcaa

SEQ ID NO: 1696 - RNA, 21 nt, Homo sapiens
uugcuuaaccuuaccguccaa

SEQ ID NO: 1697 - RNA, 21 nt, Homo sapiens
aaaagcaucaggaaguaccca

SEQ ID NO: 1698 - RNA, 21 nt, Homo sapiens
uggguacuuccugaugcuuuu

SEQ ID NO: 1699 - RNA, 21 nt, Homo sapiens
gcaggacaggcagaaguggau

SEQ ID NO: 1700 - RNA, 21 nt, Homo sapiens
auccacuucugccuguccugc

SEQ ID NO: 1701 - RNA, 22 nt, Homo sapiens
cagggcuggcagugacaugggu

SEQ ID NO: 1702 - RNA, 22 nt, Homo sapiens
acccaugucacugccagcccug

SEQ ID NO: 1703 - RNA, 22 nt, Homo sapiens
auuucccugccauucccuuggc

SEQ ID NO: 1704 - RNA, 22 nt, Homo sapiens
gccaagggaauggcagggaaau

SEQ ID NO: 1705 - RNA, 22 nt, Homo sapiens
uggcggcgguaguuaugggcuu

SEQ ID NO: 1706 - RNA, 22 nt, Homo sapiens
aagcccauaacuaccgccgcca

SEQ ID NO: 1707 - RNA, 22 nt, Homo sapiens
gcucccucuagggucgcucgga

SEQ ID NO: 1708 - RNA, 22 nt, Homo sapiens
uccgagcgacccuagagggagc

SEQ ID NO: 1709 - RNA, 22 nt, Homo sapiens
ugggaacuuaguagagguuuaa

SEQ ID NO: 1710 - RNA, 22 nt, Homo sapiens
uuaaaccucuacuaaguuccca

SEQ ID NO: 1711 - RNA, 21 nt, Homo sapiens
uggggcuagugaugcaggacg

SEQ ID NO: 1712 - RNA, 21 nt, Homo sapiens
cguccugcaucacuagcccca

SEQ ID NO: 1713 - RNA, 22 nt, Homo sapiens
gcugacagcagggcuggccgcu

SEQ ID NO: 1714 - RNA, 22 nt, Homo sapiens
agcggccagcccugcugucagc

SEQ ID NO: 1715 - RNA, 21 nt, Homo sapiens
auuggacugcugauggcccgu

SEQ ID NO: 1716 - RNA, 21 nt, Homo sapiens
acgggccaucagcaguccaau

SEQ ID NO: 1717 - RNA, 22 nt, Homo sapiens
aggccaucagcaguccaaugaa

SEQ ID NO: 1718 - RNA, 22 nt, Homo sapiens
uucauuggacugcugauggccu

SEQ ID NO: 1719 - RNA, 22 nt, Homo sapiens
uuggacagaaaacacgcaggaa

SEQ ID NO: 1720 - RNA, 22 nt, Homo sapiens
uuccugcguguuuucuguccaa

SEQ ID NO: 1721 - RNA, 20 nt, Homo sapiens
ccugcguguuuucuguccaa

SEQ ID NO: 1722 - RNA, 20 nt, Homo sapiens
uuggacagaaaacacgcagg

SEQ ID NO: 1723 - RNA, 22 nt, Homo sapiens
ugagacaggcuuaugcugcuau

SEQ ID NO: 1724 - RNA, 22 nt, Homo sapiens
auagcagcauaagccugucuca

SEQ ID NO: 1725 - RNA, 22 nt, Homo sapiens
auagcagcaugaaccugucuca

SEQ ID NO: 1726 - RNA, 22 nt, Homo sapiens
ugagacagguucaugcugcuau

SEQ ID NO: 1727 - RNA, 20 nt, Homo sapiens
gagacagguucaugcugcua

SEQ ID NO: 1728 - RNA, 20 nt, Homo sapiens
uagcagcaugaaccugucuc

SEQ ID NO: 1729 - RNA, 21 nt, Homo sapiens
auagcagcauaagccugucuc

SEQ ID NO: 1730 - RNA, 21 nt, Homo sapiens
gagacaggcuuaugcugcuau

SEQ ID NO: 1731 - RNA, 22 nt, Homo sapiens
uguguggauccuggaggaggca

SEQ ID NO: 1732 - RNA, 22 nt, Homo sapiens
ugccuccuccaggauccacaca

SEQ ID NO: 1733 - RNA, 22 nt, Homo sapiens
agacaucaagaucagucccaaa

SEQ ID NO: 1734 - RNA, 22 nt, Homo sapiens
uuugggacugaucuugaugucu

SEQ ID NO: 1735 - RNA, 22 nt, Homo sapiens
uuugggacugaucuugaugucu

SEQ ID NO: 1736 - RNA, 22 nt, Homo sapiens
agacaucaagaucagucccaaa

SEQ ID NO: 1737 - RNA, 22 nt, Homo sapiens
aaggaaccagaaaaugagaagu

SEQ ID NO: 1738 - RNA, 22 nt, Homo sapiens
acuucucauuuucugguuccuu

SEQ ID NO: 1739 - RNA, 22 nt, Homo sapiens
ucuggccuugacuugacucuuu

SEQ ID NO: 1740 - RNA, 22 nt, Homo sapiens
aaagagucaagucaaggccaga

SEQ ID NO: 1741 - RNA, 23 nt, Homo sapiens
ucaaggccagaggucccacagca

SEQ ID NO: 1742 - RNA, 23 nt, Homo sapiens
ugcugugggaccucuggccuuga

SEQ ID NO: 1743 - RNA, 21 nt, Homo sapiens
acuccaguuuuaguucucuug

SEQ ID NO: 1744 - RNA, 21 nt, Homo sapiens
caagagaacuaaaacuggagu

SEQ ID NO: 1745 - RNA, 22 nt, Homo sapiens
aagagaacugaaaguggagccu

SEQ ID NO: 1746 - RNA, 22 nt, Homo sapiens
aggcuccacuuucaguucucuu

SEQ ID NO: 1747 - RNA, 22 nt, Homo sapiens
uaagggguguauggcagaugca

SEQ ID NO: 1748 - RNA, 22 nt, Homo sapiens
ugcaucugccauacaccccuua

SEQ ID NO: 1749 - RNA, 21 nt, Homo sapiens
uuucagauaacaguauuacau

SEQ ID NO: 1750 - RNA, 21 nt, Homo sapiens
auguaauacuguuaucugaaa

SEQ ID NO: 1751 - RNA, 22 nt, Homo sapiens
aagcaauacuguuaccugaaau

SEQ ID NO: 1752 - RNA, 22 nt, Homo sapiens
auuucagguaacaguauugcuu

SEQ ID NO: 1753 - RNA, 22 nt, Homo sapiens
uacuaacugcagauucaaguga

SEQ ID NO: 1754 - RNA, 22 nt, Homo sapiens
ucacuugaaucugcaguuagua

SEQ ID NO: 1755 - RNA, 21 nt, Homo sapiens
auugccuaacaugugccagaa

SEQ ID NO: 1756 - RNA, 21 nt, Homo sapiens
uucuggcacauguuaggcaau

SEQ ID NO: 1757 - RNA, 22 nt, Homo sapiens
ucugguauguaguagguaauaa

SEQ ID NO: 1758 - RNA, 22 nt, Homo sapiens
uuauuaccuacuacauaccaga

SEQ ID NO: 1759 - RNA, 22 nt, Homo sapiens
aguugccuuuuuguucccaugc

SEQ ID NO: 1760 - RNA, 22 nt, Homo sapiens
gcaugggaacaaaaaggcaacu

SEQ ID NO: 1761 - RNA, 21 nt, Homo sapiens
auaggcaccaaaaagcaacaa

SEQ ID NO: 1762 - RNA, 21 nt, Homo sapiens
uuguugcuuuuuggugccuau

SEQ ID NO: 1763 - RNA, 22 nt, Homo sapiens
ccugcaacuuugccugaucaga

SEQ ID NO: 1764 - RNA, 22 nt, Homo sapiens
ucugaucaggcaaaguugcagg

SEQ ID NO: 1765 - RNA, 22 nt, Homo sapiens
ugaucaggcaaaauugcagacu

SEQ ID NO: 1766 - RNA, 22 nt, Homo sapiens
agucugcaauuuugccugauca

SEQ ID NO: 1767 - RNA, 22 nt, Homo sapiens
uuguggcuggucaugaggcuaa

SEQ ID NO: 1768 - RNA, 22 nt, Homo sapiens
uuagccucaugaccagccacaa

SEQ ID NO: 1769 - RNA, 21 nt, Homo sapiens
uuagucucaugaucagacaca

SEQ ID NO: 1770 - RNA, 21 nt, Homo sapiens
ugugucugaucaugagacuaa

SEQ ID NO: 1771 - RNA, 22 nt, Homo sapiens
aaagauagacaauuggcuaaau

SEQ ID NO: 1772 - RNA, 22 nt, Homo sapiens
auuuagccaauugucuaucuuu

SEQ ID NO: 1773 - RNA, 22 nt, Homo sapiens
uuagccaauuguccaucuuuag

SEQ ID NO: 1774 - RNA, 22 nt, Homo sapiens
cuaaagauggacaauuggcuaa

SEQ ID NO: 1775 - RNA, 22 nt, Homo sapiens
ucugugagaccaaagaacuacu

SEQ ID NO: 1776 - RNA, 22 nt, Homo sapiens
aguaguucuuuggucucacaga

SEQ ID NO: 1777 - RNA, 22 nt, Homo sapiens
uuguucuuuggucuuucagcca

SEQ ID NO: 1778 - RNA, 22 nt, Homo sapiens
uggcugaaagaccaaagaacaa

SEQ ID NO: 1779 - RNA, 23 nt, Homo sapiens
cgggcuguccggaggggucggcu

SEQ ID NO: 1780 - RNA, 23 nt, Homo sapiens
agccgaccccuccggacagcccg

SEQ ID NO: 1781 - RNA, 23 nt, Homo sapiens
ucuguauucuccuuugccugcag

SEQ ID NO: 1782 - RNA, 23 nt, Homo sapiens
cugcaggcaaaggagaauacaga

SEQ ID NO: 1783 - RNA, 23 nt, Homo sapiens
uacauggauggaaaccuucaagc

SEQ ID NO: 1784 - RNA, 23 nt, Homo sapiens
gcuugaagguuuccauccaugua

SEQ ID NO: 1785 - RNA, 22 nt, Homo sapiens
uauggagguucuagaccauguu

SEQ ID NO: 1786 - RNA, 22 nt, Homo sapiens
aacauggucuagaaccuccaua

SEQ ID NO: 1787 - RNA, 22 nt, Homo sapiens
gggaccauccugccugcugugg

SEQ ID NO: 1788 - RNA, 22 nt, Homo sapiens
ccacagcaggcaggaugguccc

SEQ ID NO: 1789 - RNA, 22 nt, Homo sapiens
ucagcaggcaggcuggugcagc

SEQ ID NO: 1790 - RNA, 22 nt, Homo sapiens
gcugcaccagccugccugcuga

SEQ ID NO: 1791 - RNA, 22 nt, Homo sapiens
ucaccugaccucccaugccugu

SEQ ID NO: 1792 - RNA, 22 nt, Homo sapiens
acaggcaugggaggucagguga

SEQ ID NO: 1793 - RNA, 22 nt, Homo sapiens
caggcacgggagcucaggugag

SEQ ID NO: 1794 - RNA, 22 nt, Homo sapiens
cucaccugagcucccgugccug

SEQ ID NO: 1795 - RNA, 21 nt, Homo sapiens
ugaguguugucuacgagggca

SEQ ID NO: 1796 - RNA, 21 nt, Homo sapiens
ugcccucguagacaacacuca

SEQ ID NO: 1797 - RNA, 21 nt, Homo sapiens
acugacaggagagcauuuuga

SEQ ID NO: 1798 - RNA, 21 nt, Homo sapiens
ucaaaaugcucuccugucagu

SEQ ID NO: 1799 - RNA, 22 nt, Homo sapiens
ugaccugggacucggacagcug

SEQ ID NO: 1800 - RNA, 22 nt, Homo sapiens
cagcuguccgagucccagguca

SEQ ID NO: 1801 - RNA, 22 nt, Homo sapiens
ucucaggaguaaagacagaguu

SEQ ID NO: 1802 - RNA, 22 nt, Homo sapiens
aacucugucuuuacuccugaga

SEQ ID NO: 1803 - RNA, 22 nt, Homo sapiens
aacucugucuucacucaugagu

SEQ ID NO: 1804 - RNA, 22 nt, Homo sapiens
acucaugagugaagacagaguu

SEQ ID NO: 1805 - RNA, 22 nt, Homo sapiens
uggggcggagcuuccggaggcc

SEQ ID NO: 1806 - RNA, 22 nt, Homo sapiens
ggccuccggaagcuccgcccca

SEQ ID NO: 1807 - RNA, 22 nt, Homo sapiens
caaucagcaaguauacugcccu

SEQ ID NO: 1808 - RNA, 22 nt, Homo sapiens
agggcaguauacuugcugauug

SEQ ID NO: 1809 - RNA, 22 nt, Homo sapiens
uggcagugucuuagcugguugu

SEQ ID NO: 1810 - RNA, 22 nt, Homo sapiens
acaaccagcuaagacacugcca

SEQ ID NO: 1811 - RNA, 22 nt, Homo sapiens
ccaauauuggcugugcugcucc

SEQ ID NO: 1812 - RNA, 22 nt, Homo sapiens
ggagcagcacagccaauauugg

SEQ ID NO: 1813 - RNA, 21 nt, Homo sapiens
uagcagcacagaaauauuggc

SEQ ID NO: 1814 - RNA, 21 nt, Homo sapiens
gccaauauuucugugcugcua

SEQ ID NO: 1815 - RNA, 21 nt, Homo sapiens
uaauuuuauguauaagcuagu

SEQ ID NO: 1816 - RNA, 21 nt, Homo sapiens
acuagcuuauacauaaaauua

SEQ ID NO: 1817 - RNA, 22 nt, Homo sapiens
gagcuuauucauaaaagugcag

SEQ ID NO: 1818 - RNA, 22 nt, Homo sapiens
cugcacuuuuaugaauaagcuc

SEQ ID NO: 1819 - RNA, 22 nt, Homo sapiens
aagacgggaggaaagaagggag

SEQ ID NO: 1820 - RNA, 22 nt, Homo sapiens
cucccuucuuuccucccgucuu

SEQ ID NO: 1821 - RNA, 22 nt, Homo sapiens
cagugguuuuacccuaugguag

SEQ ID NO: 1822 - RNA, 22 nt, Homo sapiens
cuaccauaggguaaaaccacug

SEQ ID NO: 1823 - RNA, 22 nt, Homo sapiens
auucuaauuucuccacgucuuu

SEQ ID NO: 1824 - RNA, 22 nt, Homo sapiens
aaagacguggagaaauuagaau

SEQ ID NO: 1825 - RNA, 22 nt, Homo sapiens
aaccagcaccccaacuuuggac

SEQ ID NO: 1826 - RNA, 22 nt, Homo sapiens
guccaaaguuggggugcugguu

SEQ ID NO: 1827 - RNA, 24 nt, Homo sapiens
aaagacauaggauagagucaccuc

SEQ ID NO: 1828 - RNA, 24 nt, Homo sapiens
gaggugacucuauccuaugucuuu

SEQ ID NO: 1829 - RNA, 22 nt, Homo sapiens
uaacugguugaacaacugaacc

SEQ ID NO: 1830 - RNA, 22 nt, Homo sapiens
gguucaguuguucaaccaguua

SEQ ID NO: 1831 - RNA, 20 nt, Homo sapiens
cgugccacccuuuuccccag

SEQ ID NO: 1832 - RNA, 20 nt, Homo sapiens
cuggggaaaaggguggcacg

SEQ ID NO: 1833 - RNA, 17 nt, Homo sapiens
guggggccaggcggugg

SEQ ID NO: 1834 - RNA, 17 nt, Homo sapiens
ccaccgccuggccccac

SEQ ID NO: 1835 - RNA, 22 nt, Homo sapiens
aaaagcuggguugagagggcaa

SEQ ID NO: 1836 - RNA, 22 nt, Homo sapiens
uugcccucucaacccagcuuuu

SEQ ID NO: 1837 - RNA, 22 nt, Homo sapiens
gguccagaggggagauagguuc

SEQ ID NO: 1838 - RNA, 22 nt, Homo sapiens
gaaccuaucuccccucuggacc

SEQ ID NO: 1839 - RNA, 23 nt, Homo sapiens
uagccuucagaucuugguguuuu

SEQ ID NO: 1840 - RNA, 23 nt, Homo sapiens
aaaacaccaagaucugaaggcua

SEQ ID NO: 1841 - RNA, 23 nt, Homo sapiens
ccacuuggaucugaaggcugccc

SEQ ID NO: 1842 - RNA, 23 nt, Homo sapiens
gggcagccuucagauccaagugg

SEQ ID NO: 1843 - RNA, 22 nt, Homo sapiens
ugugcgcagggagaccucuccc

SEQ ID NO: 1844 - RNA, 22 nt, Homo sapiens
gggagaggucucccugcgcaca

SEQ ID NO: 1845 - RNA, 22 nt, Homo sapiens
ugucuacuacuggagacacugg

SEQ ID NO: 1846 - RNA, 22 nt, Homo sapiens
ccagugucuccaguaguagaca

SEQ ID NO: 1847 - RNA, 21 nt, Homo sapiens
aaggcagggcccccgcucccc

SEQ ID NO: 1848 - RNA, 21 nt, Homo sapiens
ggggagcgggggcccugccuu

SEQ ID NO: 1849 - RNA, 21 nt, Homo sapiens
cugacuguugccguccuccag

SEQ ID NO: 1850 - RNA, 21 nt, Homo sapiens
cuggaggacggcaacagucag

SEQ ID NO: 1851 - RNA, 25 nt, Homo sapiens
aaaaaccacaauuacuuuugcacca

SEQ ID NO: 1852 - RNA, 25 nt, Homo sapiens
uggugcaaaaguaauugugguuuuu

SEQ ID NO: 1853 - RNA, 23 nt, Homo sapiens
caaaaaccgcaauuacuuuugca

SEQ ID NO: 1854 - RNA, 23 nt, Homo sapiens
ugcaaaaguaauugcgguuuuug

SEQ ID NO: 1855 - RNA, 22 nt, Homo sapiens
augugccugagggaguaagaca

SEQ ID NO: 1856 - RNA, 22 nt, Homo sapiens
ugucuuacucccucaggcacau

SEQ ID NO: 1857 - RNA, 20 nt, Homo sapiens
ucuuacucccucaggcacug

SEQ ID NO: 1858 - RNA, 20 nt, Homo sapiens
cagugccugagggaguaaga

SEQ ID NO: 1859 - RNA, 22 nt, Homo sapiens
agacacauuuggagagggaccc

SEQ ID NO: 1860 - RNA, 22 nt, Homo sapiens
gggucccucuccaaaugugucu

SEQ ID NO: 1861 - RNA, 22 nt, Homo sapiens
gguucccucuccaaaugugucu

SEQ ID NO: 1862 - RNA, 22 nt, Homo sapiens
agacacauuuggagagggaacc

SEQ ID NO: 1863 - RNA, 21 nt, Homo sapiens
aaaauuucuuucacuacuuag

SEQ ID NO: 1864 - RNA, 21 nt, Homo sapiens
cuaaguagugaaagaaauuuu

SEQ ID NO: 1865 - RNA, 21 nt, Homo sapiens
uuagugaaggcuauuuuaauu

SEQ ID NO: 1866 - RNA, 21 nt, Homo sapiens
aauuaaaauagccuucacuaa

SEQ ID NO: 1867 - RNA, 20 nt, Homo sapiens
acuguaaacgcuuucugaug

SEQ ID NO: 1868 - RNA, 20 nt, Homo sapiens
caucagaaagcguuuacagu

SEQ ID NO: 1869 - RNA, 22 nt, Homo sapiens
gcaugugaugaagcaaaucagu

SEQ ID NO: 1870 - RNA, 22 nt, Homo sapiens
acugauuugcuucaucacaugc

SEQ ID NO: 1871 - RNA, 24 nt, Homo sapiens
caaagugaugaguaauacuggcug

SEQ ID NO: 1872 - RNA, 24 nt, Homo sapiens
cagccaguauuacucaucacuuug

SEQ ID NO: 1873 - RNA, 20 nt, Homo sapiens
gaaucggaaaggaggcgccg

SEQ ID NO: 1874 - RNA, 20 nt, Homo sapiens
cggcgccuccuuuccgauuc

SEQ ID NO: 1875 - RNA, 21 nt, Homo sapiens
uugugaagaaagaaauucuua

SEQ ID NO: 1876 - RNA, 21 nt, Homo sapiens
uaagaauuucuuucuucacaa

SEQ ID NO: 1877 - RNA, 22 nt, Homo sapiens
aggaggcaucuugagaaaugga

SEQ ID NO: 1878 - RNA, 22 nt, Homo sapiens
uccauuucucaagaugccuccu

SEQ ID NO: 1879 - RNA, 24 nt, Homo sapiens
acaaaaaaaaaagcccaacccuuc

SEQ ID NO: 1880 - RNA, 24 nt, Homo sapiens
gaaggguugggcuuuuuuuuuugu

SEQ ID NO: 1881 - RNA, 22 nt, Homo sapiens
uguuguacuuuuuuuuuuguuc

SEQ ID NO: 1882 - RNA, 22 nt, Homo sapiens
gaacaaaaaaaaaaguacaaca

SEQ ID NO: 1883 - RNA, 21 nt, Homo sapiens
ucucucggcuccucgcggcuc

SEQ ID NO: 1884 - RNA, 21 nt, Homo sapiens
gagccgcgaggagccgagaga

SEQ ID NO: 1885 - RNA, 23 nt, Homo sapiens
cgagggcauuucaugaugcaggc

SEQ ID NO: 1886 - RNA, 23 nt, Homo sapiens
gccugcaucaugaaaugcccucg

SEQ ID NO: 1887 - RNA, 22 nt, Homo sapiens
augaagugcacucaugauaugu

SEQ ID NO: 1888 - RNA, 22 nt, Homo sapiens
acauaucaugagugcacuucau

SEQ ID NO: 1889 - RNA, 22 nt, Homo sapiens
ugucuacauuaaugaaaagagc

SEQ ID NO: 1890 - RNA, 22 nt, Homo sapiens
gcucuuuucauuaauguagaca

SEQ ID NO: 1891 - RNA, 22 nt, Homo sapiens
ucacccugcaucccgcacccag

SEQ ID NO: 1892 - RNA, 22 nt, Homo sapiens
cugggugcgggaugcaggguga

SEQ ID NO: 1893 - RNA, 22 nt, Homo sapiens
gugggcugggcugggcugggcc

SEQ ID NO: 1894 - RNA, 22 nt, Homo sapiens
ggcccagcccagcccagcccac

SEQ ID NO: 1895 - RNA, 20 nt, Homo sapiens
cgcgggucggggucugcagg

SEQ ID NO: 1896 - RNA, 20 nt, Homo sapiens
ccugcagaccccgacccgcg

SEQ ID NO: 1897 - RNA, 21 nt, Homo sapiens
ucaccugagcucccgugccug

SEQ ID NO: 1898 - RNA, 21 nt, Homo sapiens
caggcacgggagcucagguga

SEQ ID NO: 1899 - RNA, 20 nt, Homo sapiens
aggcaugggaggucagguga

SEQ ID NO: 1900 - RNA, 20 nt, Homo sapiens
ucaccugaccucccaugccu

SEQ ID NO: 1901 - RNA, 23 nt, Homo sapiens
caucagcacccuauguccuuucu

SEQ ID NO: 1902 - RNA, 23 nt, Homo sapiens
agaaaggacauagggugcugaug

SEQ ID NO: 1903 - RNA, 22 nt, Homo sapiens
aaagacauaguugcaagauggg

SEQ ID NO: 1904 - RNA, 22 nt, Homo sapiens
cccaucuugcaacuaugucuuu

SEQ ID NO: 1905 - RNA, 22 nt, Homo sapiens
uuugugaccugguccacuaacc

SEQ ID NO: 1906 - RNA, 22 nt, Homo sapiens
gguuaguggaccaggucacaaa

SEQ ID NO: 1907 - RNA, 22 nt, Homo sapiens
gaugguugaccagagagcacac

SEQ ID NO: 1908 - RNA, 22 nt, Homo sapiens
gugugcucucuggucaaccauc

SEQ ID NO: 1909 - RNA, 20 nt, Homo sapiens
aaaagcuggguugagagggu

SEQ ID NO: 1910 - RNA, 20 nt, Homo sapiens
acccucucaacccagcuuuu

SEQ ID NO: 1911 - RNA, 21 nt, Homo sapiens
cacaagguauugguauuaccu

SEQ ID NO: 1912 - RNA, 21 nt, Homo sapiens
agguaauaccaauaccuugug

SEQ ID NO: 1913 - RNA, 22 nt, Homo sapiens
uaguaccaguaccuuguguuca

SEQ ID NO: 1914 - RNA, 22 nt, Homo sapiens
ugaacacaagguacugguacua

SEQ ID NO: 1915 - RNA, 22 nt, Homo sapiens
aguauucuguaccagggaaggu

SEQ ID NO: 1916 - RNA, 22 nt, Homo sapiens
accuucccugguacagaauacu

SEQ ID NO: 1917 - RNA, 22 nt, Homo sapiens
uggcaguguauuguuagcuggu

SEQ ID NO: 1918 - RNA, 22 nt, Homo sapiens
accagcuaacaauacacugcca

SEQ ID NO: 1919 - RNA, 22 nt, Homo sapiens
uauacaagggcaagcucucugu

SEQ ID NO: 1920 - RNA, 22 nt, Homo sapiens
acagagagcuugcccuuguaua

SEQ ID NO: 1921 - RNA, 22 nt, Homo sapiens
agcgagguugcccuuuguauau

SEQ ID NO: 1922 - RNA, 22 nt, Homo sapiens
auauacaaagggcaaccucgcu

SEQ ID NO: 1923 - RNA, 22 nt, Homo sapiens
caaucacuaacuccacugccau

SEQ ID NO: 1924 - RNA, 22 nt, Homo sapiens
auggcaguggaguuagugauug

SEQ ID NO: 1925 - RNA, 23 nt, Homo sapiens
uaggcagugucauuagcugauug

SEQ ID NO: 1926 - RNA, 23 nt, Homo sapiens
caaucagcuaaugacacugccua

SEQ ID NO: 1927 - RNA, 22 nt, Homo sapiens
cagccacaacuacccugccacu

SEQ ID NO: 1928 - RNA, 22 nt, Homo sapiens
aguggcaggguaguuguggcug

SEQ ID NO: 1929 - RNA, 22 nt, Homo sapiens
aggcaguguauuguuagcuggc

SEQ ID NO: 1930 - RNA, 22 nt, Homo sapiens
gccagcuaacaauacacugccu

SEQ ID NO: 1931 - RNA, 22 nt, Homo sapiens
aaucacuaaccacacggccagg

SEQ ID NO: 1932 - RNA, 22 nt, Homo sapiens
ccuggccgugugguuagugauu

SEQ ID NO: 1933 - RNA, 23 nt, Homo sapiens
aggcaguguaguuagcugauugc

SEQ ID NO: 1934 - RNA, 23 nt, Homo sapiens
gcaaucagcuaacuacacugccu

SEQ ID NO: 1935 - RNA, 20 nt, Homo sapiens
guccgcucggcgguggccca

SEQ ID NO: 1936 - RNA, 20 nt, Homo sapiens
ugggccaccgccgagcggac

SEQ ID NO: 1937 - RNA, 23 nt, Homo sapiens
gaacgccuguucuugccaggugg

SEQ ID NO: 1938 - RNA, 23 nt, Homo sapiens
ccaccuggcaagaacaggcguuc

SEQ ID NO: 1939 - RNA, 19 nt, Homo sapiens
aagugugcagggcacuggu

SEQ ID NO: 1940 - RNA, 19 nt, Homo sapiens
accagugcccugcacacuu

SEQ ID NO: 1941 - RNA, 21 nt, Homo sapiens
aggggugcuaucugugauuga

SEQ ID NO: 1942 - RNA, 21 nt, Homo sapiens
ucaaucacagauagcaccccu

SEQ ID NO: 1943 - RNA, 22 nt, Homo sapiens
cuuucagucagauguuugcugc

SEQ ID NO: 1944 - RNA, 22 nt, Homo sapiens
gcagcaaacaucugacugaaag

SEQ ID NO: 1945 - RNA, 22 nt, Homo sapiens
uguaaacauccccgacuggaag

SEQ ID NO: 1946 - RNA, 22 nt, Homo sapiens
cuuccagucggggauguuuaca

SEQ ID NO: 1947 - RNA, 22 nt, Homo sapiens
uguaaacauccucgacuggaag

SEQ ID NO: 1948 - RNA, 22 nt, Homo sapiens
cuuccagucgaggauguuuaca

SEQ ID NO: 1949 - RNA, 22 nt, Homo sapiens
agaaguaauugcgguuuugcca

SEQ ID NO: 1950 - RNA, 22 nt, Homo sapiens
uggcaaaaccgcaauuacuucu

SEQ ID NO: 1951 - RNA, 22 nt, Homo sapiens
caaaacuggcaauuacuuuugc

SEQ ID NO: 1952 - RNA, 22 nt, Homo sapiens
gcaaaaguaauugccaguuuug

SEQ ID NO: 1953 - RNA, 22 nt, Homo sapiens
aaaaguaauugcgaguuuuacc

SEQ ID NO: 1954 - RNA, 22 nt, Homo sapiens
gguaaaacucgcaauuacuuuu

SEQ ID NO: 1955 - RNA, 22 nt, Homo sapiens
caagaaccucaguugcuuuugu

SEQ ID NO: 1956 - RNA, 22 nt, Homo sapiens
acaaaagcaacugagguucuug

SEQ ID NO: 1957 - RNA, 22 nt, Homo sapiens
caaaaaucucaauuacuuuugc

SEQ ID NO: 1958 - RNA, 22 nt, Homo sapiens
gcaaaaguaauugagauuuuug

SEQ ID NO: 1959 - RNA, 22 nt, Homo sapiens
caaaaaccacaguuucuuuugc

SEQ ID NO: 1960 - RNA, 22 nt, Homo sapiens
gcaaaagaaacugugguuuuug

SEQ ID NO: 1961 - RNA, 22 nt, Homo sapiens
aaaaguaauugugguuuuugcc

SEQ ID NO: 1962 - RNA, 22 nt, Homo sapiens
ggcaaaaaccacaauuacuuuu

SEQ ID NO: 1963 - RNA, 21 nt, Homo sapiens
ugacaacuauggaugagcucu

SEQ ID NO: 1964 - RNA, 21 nt, Homo sapiens
agagcucauccauaguuguca

SEQ ID NO: 1965 - RNA, 21 nt, Homo sapiens
aacaggugacugguuagacaa

SEQ ID NO: 1966 - RNA, 21 nt, Homo sapiens
uugucuaaccagucaccuguu

SEQ ID NO: 1967 - RNA, 21 nt, Homo sapiens
aaaacggugagauuuuguuuu

SEQ ID NO: 1968 - RNA, 21 nt, Homo sapiens
aaaacaaaaucucaccguuuu

SEQ ID NO: 1969 - RNA, 21 nt, Homo sapiens
gcuaguccugacucagccagu

SEQ ID NO: 1970 - RNA, 21 nt, Homo sapiens
acuggcugagucaggacuagc

SEQ ID NO: 1971 - RNA, 21 nt, Homo sapiens
aggguaagcugaaccucugau

SEQ ID NO: 1972 - RNA, 21 nt, Homo sapiens
aucagagguucagcuuacccu

SEQ ID NO: 1973 - RNA, 22 nt, Homo sapiens
auauuaccauuagcucaucuuu

SEQ ID NO: 1974 - RNA, 22 nt, Homo sapiens
aaagaugagcuaaugguaauau

SEQ ID NO: 1975 - RNA, 22 nt, Homo sapiens
gaugagcucauuguaauaugag

SEQ ID NO: 1976 - RNA, 22 nt, Homo sapiens
cucauauuacaaugagcucauc

SEQ ID NO: 1977 - RNA, 19 nt, Homo sapiens
agguugacauacguuuccc

SEQ ID NO: 1978 - RNA, 19 nt, Homo sapiens
gggaaacguaugucaaccu

SEQ ID NO: 1979 - RNA, 20 nt, Homo sapiens
auguauaaauguauacacac

SEQ ID NO: 1980 - RNA, 20 nt, Homo sapiens
guguguauacauuuauacau

SEQ ID NO: 1981 - RNA, 24 nt, Homo sapiens
cugaagugauguguaacugaucag

SEQ ID NO: 1982 - RNA, 24 nt, Homo sapiens
cugaucaguuacacaucacuucag

SEQ ID NO: 1983 - RNA, 22 nt, Homo sapiens
aagauguggaaaaauuggaauc

SEQ ID NO: 1984 - RNA, 22 nt, Homo sapiens
gauuccaauuuuuccacaucuu

SEQ ID NO: 1985 - RNA, 21 nt, Homo sapiens
uagauaaaauauugguaccug

SEQ ID NO: 1986 - RNA, 21 nt, Homo sapiens
cagguaccaauauuuuaucua

SEQ ID NO: 1987 - RNA, 21 nt, Homo sapiens
cuucuugugcucuaggauugu

SEQ ID NO: 1988 - RNA, 21 nt, Homo sapiens
acaauccuagagcacaagaag

SEQ ID NO: 1989 - RNA, 22 nt, Homo sapiens
uaugcauuguauuuuuaggucc

SEQ ID NO: 1990 - RNA, 22 nt, Homo sapiens
ggaccuaaaaauacaaugcaua

SEQ ID NO: 1991 - RNA, 21 nt, Homo sapiens
uuuccauaggugaugagucac

SEQ ID NO: 1992 - RNA, 21 nt, Homo sapiens
gugacucaucaccuauggaaa

SEQ ID NO: 1993 - RNA, 21 nt, Homo sapiens
uuggccacaauggguuagaac

SEQ ID NO: 1994 - RNA, 21 nt, Homo sapiens
guucuaacccauuguggccaa

SEQ ID NO: 1995 - RNA, 22 nt, Homo sapiens
ugugucacucgaugaccacugu

SEQ ID NO: 1996 - RNA, 22 nt, Homo sapiens
acaguggucaucgagugacaca

SEQ ID NO: 1997 - RNA, 23 nt, Homo sapiens
acuuacagacaagagccuugcuc

SEQ ID NO: 1998 - RNA, 23 nt, Homo sapiens
gagcaaggcucuugucuguaagu

SEQ ID NO: 1999 - RNA, 19 nt, Homo sapiens
aggcugcggaauucaggac

SEQ ID NO: 2000 - RNA, 19 nt, Homo sapiens
guccugaauuccgcagccu

SEQ ID NO: 2001 - RNA, 23 nt, Homo sapiens
uaaaucccauggugccuucuccu

SEQ ID NO: 2002 - RNA, 23 nt, Homo sapiens
aggagaaggcaccaugggauuua

SEQ ID NO: 2003 - RNA, 21 nt, Homo sapiens
aaacuacugaaaaucaaagau

SEQ ID NO: 2004 - RNA, 21 nt, Homo sapiens
aucuuugauuuucaguaguuu

SEQ ID NO: 2005 - RNA, 21 nt, Homo sapiens
guucaaauccagaucuauaac

SEQ ID NO: 2006 - RNA, 21 nt, Homo sapiens
guuauagaucuggauuugaac

SEQ ID NO: 2007 - RNA, 19 nt, Homo sapiens
ccgguuccagucccuggag

SEQ ID NO: 2008 - RNA, 19 nt, Homo sapiens
cuccagggacuggaaccgg

SEQ ID NO: 2009 - RNA, 20 nt, Homo sapiens
aggguguuucucucaucucu

SEQ ID NO: 2010 - RNA, 20 nt, Homo sapiens
agagaugagagaaacacccu

SEQ ID NO: 2011 - RNA, 24 nt, Homo sapiens
gaccuggacauguuugugcccagu

SEQ ID NO: 2012 - RNA, 24 nt, Homo sapiens
acugggcacaaacauguccagguc

SEQ ID NO: 2013 - RNA, 20 nt, Homo sapiens
auggagauagauauagaaau

SEQ ID NO: 2014 - RNA, 20 nt, Homo sapiens
auuucuauaucuaucuccau

SEQ ID NO: 2015 - RNA, 19 nt, Homo sapiens
agcugucugaaaaugucuu

SEQ ID NO: 2016 - RNA, 19 nt, Homo sapiens
aagacauuuucagacagcu

SEQ ID NO: 2017 - RNA, 21 nt, Homo sapiens
agaccuggcccagaccucagc

SEQ ID NO: 2018 - RNA, 21 nt, Homo sapiens
gcugaggucugggccaggucu

SEQ ID NO: 2019 - RNA, 23 nt, Homo sapiens
acuugggcacugaaacaaugucc

SEQ ID NO: 2020 - RNA, 23 nt, Homo sapiens
ggacauuguuucagugcccaagu

SEQ ID NO: 2021 - RNA, 24 nt, Homo sapiens
acugggggcuuucgggcucugcgu

SEQ ID NO: 2022 - RNA, 24 nt, Homo sapiens
acgcagagcccgaaagcccccagu

SEQ ID NO: 2023 - RNA, 23 nt, Homo sapiens
aucgcugcgguugcgagcgcugu

SEQ ID NO: 2024 - RNA, 23 nt, Homo sapiens
acagcgcucgcaaccgcagcgau

SEQ ID NO: 2025 - RNA, 22 nt, Homo sapiens
gucccucuccaaaugugucuug

SEQ ID NO: 2026 - RNA, 22 nt, Homo sapiens
caagacacauuuggagagggac

SEQ ID NO: 2027 - RNA, 22 nt, Homo sapiens
acuuguaugcuagcucagguag

SEQ ID NO: 2028 - RNA, 22 nt, Homo sapiens
cuaccugagcuagcauacaagu

SEQ ID NO: 2029 - RNA, 22 nt, Homo sapiens
uuuaggauaagcuugacuuuug

SEQ ID NO: 2030 - RNA, 22 nt, Homo sapiens
caaaagucaagcuuauccuaaa

SEQ ID NO: 2031 - RNA, 21 nt, Homo sapiens
guguugaaacaaucucuacug

SEQ ID NO: 2032 - RNA, 21 nt, Homo sapiens
caguagagauuguuucaacac

SEQ ID NO: 2033 - RNA, 22 nt, Homo sapiens
uaugucugcugaccaucaccuu

SEQ ID NO: 2034 - RNA, 22 nt, Homo sapiens
aaggugauggucagcagacaua

SEQ ID NO: 2035 - RNA, 22 nt, Homo sapiens
ggggcuggggccggggccgagc

SEQ ID NO: 2036 - RNA, 22 nt, Homo sapiens
gcucggccccggccccagcccc

SEQ ID NO: 2037 - RNA, 22 nt, Homo sapiens
ugagguaguagguuguaugguu

SEQ ID NO: 2038 - RNA, 22 nt, Homo sapiens
aaccauacaaccuacuaccuca

SEQ ID NO: 2039 - RNA, 21 nt, Homo sapiens
gugucuuuugcucugcaguca

SEQ ID NO: 2040 - RNA, 21 nt, Homo sapiens
ugacugcagagcaaaagacac

SEQ ID NO: 2041 - RNA, 24 nt, Homo sapiens
ccccgggaacgucgagacuggagc

SEQ ID NO: 2042 - RNA, 24 nt, Homo sapiens
gcuccagucucgacguucccgggg

SEQ ID NO: 2043 - RNA, 22 nt, Homo sapiens
acccgucccguucguccccgga

SEQ ID NO: 2044 - RNA, 22 nt, Homo sapiens
uccggggacgaacgggacgggu

SEQ ID NO: 2045 - RNA, 22 nt, Homo sapiens
augggugaauuuguagaaggau

SEQ ID NO: 2046 - RNA, 22 nt, Homo sapiens
auccuucuacaaauucacccau

SEQ ID NO: 2047 - RNA, 22 nt, Homo sapiens
cuggacugagccgugcuacugg

SEQ ID NO: 2048 - RNA, 22 nt, Homo sapiens
ccaguagcacggcucaguccag

SEQ ID NO: 2049 - RNA, 22 nt, Homo sapiens
cuggacugagccaugcuacugg

SEQ ID NO: 2050 - RNA, 22 nt, Homo sapiens
ccaguagcauggcucaguccag

SEQ ID NO: 2051 - RNA, 22 nt, Homo sapiens
uacguagauauauauguauuuu

SEQ ID NO: 2052 - RNA, 22 nt, Homo sapiens
aaaauacauauauaucuacgua

SEQ ID NO: 2053 - RNA, 24 nt, Homo sapiens
aaauauauauauauauguacguau

SEQ ID NO: 2054 - RNA, 22 nt, Homo sapiens
gcucuuuucauuaauguagaca

SEQ ID NO: 2055 - RNA, 22 nt, Homo sapiens
ugcuggaucagugguucgaguc

SEQ ID NO: 2056 - RNA, 22 nt, Homo sapiens
gacucgaaccacugauccagca

SEQ ID NO: 2057 - RNA, 19 nt, Homo sapiens
uggauuuuuggaucaggga

SEQ ID NO: 2058 - RNA, 19 nt, Homo sapiens
ucccugauccaaaaaucca

SEQ ID NO: 2059 - RNA, 22 nt, Homo sapiens
uuauaaagcaaugagacugauu

SEQ ID NO: 2060 - RNA, 22 nt, Homo sapiens
aaucagucucauugcuuuauaa

SEQ ID NO: 2061 - RNA, 23 nt, Homo sapiens
uagugcaauauugcuuauagggu

SEQ ID NO: 2062 - RNA, 23 nt, Homo sapiens
acccuauaagcaauauugcacua

SEQ ID NO: 2063 - RNA, 22 nt, Homo sapiens
acccuaucaauauugucucugc

SEQ ID NO: 2064 - RNA, 22 nt, Homo sapiens
gcagagacaauauugauagggu

SEQ ID NO: 2065 - RNA, 17 nt, Homo sapiens
uaagugcuuccaugcuu

SEQ ID NO: 2066 - RNA, 17 nt, Homo sapiens
aagcauggaagcacuua

SEQ ID NO: 2067 - RNA, 22 nt, Homo sapiens
ucggccugaccacccaccccac

SEQ ID NO: 2068 - RNA, 22 nt, Homo sapiens
gugggguggguggucaggccga

SEQ ID NO: 2069 - RNA, 21 nt, Homo sapiens
ggggggggggggggggggccg

SEQ ID NO: 2070 - RNA, 21 nt, Homo sapiens
cggcccccccccccccccccc

SEQ ID NO: 2071 - RNA, 22 nt, Homo sapiens
cuauacgaccugcugccuuucu

SEQ ID NO: 2072 - RNA, 22 nt, Homo sapiens
agaaaggcagcaggucguauag

SEQ ID NO: 2073 - RNA, 22 nt, Homo sapiens
agagguaguagguugcauaguu

SEQ ID NO: 2074 - RNA, 22 nt, Homo sapiens
aacuaugcaaccuacuaccucu

SEQ ID NO: 2075 - RNA, 22 nt, Homo sapiens
ccgcacuguggguacuugcugc

SEQ ID NO: 2076 - RNA, 22 nt, Homo sapiens
gcagcaaguacccacagugcgg

SEQ ID NO: 2077 - RNA, 21 nt, Homo sapiens
uaaagugcugacagugcagau

SEQ ID NO: 2078 - RNA, 21 nt, Homo sapiens
aucugcacugucagcacuuua

SEQ ID NO: 2079 - RNA, 22 nt, Homo sapiens
aacuggaucaauuauaggagug

SEQ ID NO: 2080 - RNA, 22 nt, Homo sapiens
cacuccuauaauugauccaguu

SEQ ID NO: 2081 - RNA, 26 nt, Homo sapiens
aaguaguugguuuguaugagaugguu

SEQ ID NO: 2082 - RNA, 26 nt, Homo sapiens
aaccaucucauacaaaccaacuacuu

SEQ ID NO: 2083 - RNA, 21 nt, Homo sapiens
aagugaucuaaaggccuacau

SEQ ID NO: 2084 - RNA, 21 nt, Homo sapiens
auguaggccuuuagaucacuu

SEQ ID NO: 2085 - RNA, 22 nt, Homo sapiens
ucagaugaucuaaaggccuaua

SEQ ID NO: 2086 - RNA, 22 nt, Homo sapiens
uauaggccuuuagaucaucuga

SEQ ID NO: 2087 - RNA, 21 nt, Homo sapiens
uaggccuuuagaucacuuaaa

SEQ ID NO: 2088 - RNA, 21 nt, Homo sapiens
uuuaagugaucuaaaggccua

SEQ ID NO: 2089 - RNA, 21 nt, Homo sapiens
acucuagcugccaaaggcgcu

SEQ ID NO: 2090 - RNA, 21 nt, Homo sapiens
agcgccuuuggcagcuagagu

SEQ ID NO: 2091 - RNA, 22 nt, Homo sapiens
agaaggaaauugaauucauuua

SEQ ID NO: 2092 - RNA, 22 nt, Homo sapiens
uaaaugaauucaauuuccuucu

SEQ ID NO: 2093 - RNA, 21 nt, Homo sapiens
agagaagaagaucagccugca

SEQ ID NO: 2094 - RNA, 21 nt, Homo sapiens
ugcaggcugaucuucuucucu

SEQ ID NO: 2095 - RNA, 24 nt, Homo sapiens
agccuggaagcuggagccugcagu

SEQ ID NO: 2096 - RNA, 24 nt, Homo sapiens
acugcaggcuccagcuuccaggcu

SEQ ID NO: 2097 - RNA, 23 nt, Homo sapiens
aggaugagcaaagaaaguagauu

SEQ ID NO: 2098 - RNA, 23 nt, Homo sapiens
aaucuacuuucuuugcucauccu

SEQ ID NO: 2099 - RNA, 22 nt, Homo sapiens
aaccacuuucuuugcucaucca

SEQ ID NO: 2100 - RNA, 22 nt, Homo sapiens
uggaugagcaaagaaagugguu

SEQ ID NO: 2101 - RNA, 22 nt, Homo sapiens
cggaugagcaaagaaagugguu

SEQ ID NO: 2102 - RNA, 22 nt, Homo sapiens
aaccacuuucuuugcucauccg

SEQ ID NO: 2103 - RNA, 22 nt, Homo sapiens
aggcauugacuucucacuagcu

SEQ ID NO: 2104 - RNA, 22 nt, Homo sapiens
agcuagugagaagucaaugccu

SEQ ID NO: 2105 - RNA, 21 nt, Homo sapiens
agugaaugauggguucugacc

SEQ ID NO: 2106 - RNA, 21 nt, Homo sapiens
ggucagaacccaucauucacu

SEQ ID NO: 2107 - RNA, 21 nt, Homo sapiens
aguuaggauuaggucguggaa

SEQ ID NO: 2108 - RNA, 21 nt, Homo sapiens
uuccacgaccuaauccuaacu

SEQ ID NO: 2109 - RNA, 19 nt, Homo sapiens
auggauaaggcuuuggcuu

SEQ ID NO: 2110 - RNA, 19 nt, Homo sapiens
aagccaaagccuuauccau

SEQ ID NO: 2111 - RNA, 22 nt, Homo sapiens
augguacccuggcauacugagu

SEQ ID NO: 2112 - RNA, 22 nt, Homo sapiens
acucaguaugccaggguaccau

SEQ ID NO: 2113 - RNA, 23 nt, Homo sapiens
caagucuuauuugagcaccuguu

SEQ ID NO: 2114 - RNA, 23 nt, Homo sapiens
aacaggugcucaaauaagacuug

SEQ ID NO: 2115 - RNA, 22 nt, Homo sapiens
caggauguggucaaguguuguu

SEQ ID NO: 2116 - RNA, 22 nt, Homo sapiens
aacaacacuugaccacauccug

SEQ ID NO: 2117 - RNA, 23 nt, Homo sapiens
ccucagggcuguagaacagggcu

SEQ ID NO: 2118 - RNA, 23 nt, Homo sapiens
agcccuguucuacagcccugagg

SEQ ID NO: 2119 - RNA, 21 nt, Homo sapiens
ccuguugaaguguaaucccca

SEQ ID NO: 2120 - RNA, 21 nt, Homo sapiens
uggggauuacacuucaacagg

SEQ ID NO: 2121 - RNA, 18 nt, Homo sapiens
cgggcguggugguggggg

SEQ ID NO: 2122 - RNA, 18 nt, Homo sapiens
cccccaccaccacgcccg

SEQ ID NO: 2123 - RNA, 20 nt, Homo sapiens
cgggcgugguggugggggug

SEQ ID NO: 2124 - RNA, 20 nt, Homo sapiens
cacccccaccaccacgcccg

SEQ ID NO: 2125 - RNA, 23 nt, Homo sapiens
cuggagauauggaagagcugugu

SEQ ID NO: 2126 - RNA, 23 nt, Homo sapiens
acacagcucuuccauaucuccag

SEQ ID NO: 2127 - RNA, 26 nt, Homo sapiens
gaugaugauggcagcaaauucugaaa

SEQ ID NO: 2128 - RNA, 26 nt, Homo sapiens
uuucagaauuugcugccaucaucauc

SEQ ID NO: 2129 - RNA, 25 nt, Homo sapiens
gggcgacaaagcaagacucuuucuu

SEQ ID NO: 2130 - RNA, 25 nt, Homo sapiens
aagaaagagucuugcuuugucgccc

SEQ ID NO: 2131 - RNA, 25 nt, Homo sapiens
gaacccaugagguugaggcugcagu

SEQ ID NO: 2132 - RNA, 25 nt, Homo sapiens
acugcagccucaaccucauggguuc

SEQ ID NO: 2133 - RNA, 17 nt, Homo sapiens
gugggggagaggcuguc

SEQ ID NO: 2134 - RNA, 17 nt, Homo sapiens
gacagccucucccccac

SEQ ID NO: 2135 - RNA, 20 nt, Homo sapiens
uaaagagcccuguggagaca

SEQ ID NO: 2136 - RNA, 20 nt, Homo sapiens
ugucuccacagggcucuuua

SEQ ID NO: 2137 - RNA, 22 nt, Homo sapiens
uaguacugugcauaucaucuau

SEQ ID NO: 2138 - RNA, 22 nt, Homo sapiens
auagaugauaugcacaguacua

SEQ ID NO: 2139 - RNA, 20 nt, Homo sapiens
ucguuugccuuuuucugcuu

SEQ ID NO: 2140 - RNA, 20 nt, Homo sapiens
aagcagaaaaaggcaaacga

SEQ ID NO: 2141 - RNA, 21 nt, Homo sapiens
uggacugcccugaucuggaga

SEQ ID NO: 2142 - RNA, 21 nt, Homo sapiens
ucuccagaucagggcagucca

SEQ ID NO: 2143 - RNA, 22 nt, Homo sapiens
uggguggucuggagauuugugc

SEQ ID NO: 2144 - RNA, 22 nt, Homo sapiens
gcacaaaucuccagaccaccca

SEQ ID NO: 2145 - RNA, 22 nt, Homo sapiens
ugugagguuggcauuguugucu

SEQ ID NO: 2146 - RNA, 22 nt, Homo sapiens
agacaacaaugccaaccucaca

SEQ ID NO: 2147 - RNA, 17 nt, Homo sapiens
uucaaguaauucaggug

SEQ ID NO: 2148 - RNA, 17 nt, Homo sapiens
caccugaauuacuugaa

SEQ ID NO: 2149 - RNA, 22 nt, Homo sapiens
uucuggaauucugugugaggga

SEQ ID NO: 2150 - RNA, 22 nt, Homo sapiens
ucccucacacagaauuccagaa

SEQ ID NO: 2151 - RNA, 22 nt, Homo sapiens
uuuucaacucuaaugggagaga

SEQ ID NO: 2152 - RNA, 22 nt, Homo sapiens
ucucucccauuagaguugaaaa

SEQ ID NO: 2153 - RNA, 18 nt, Homo sapiens
acguuggcucugguggug

SEQ ID NO: 2154 - RNA, 18 nt, Homo sapiens
caccaccagagccaacgu

SEQ ID NO: 2155 - RNA, 22 nt, Homo sapiens
ccaccuccccugcaaacgucca

SEQ ID NO: 2156 - RNA, 22 nt, Homo sapiens
uggacguuugcaggggaggugg

SEQ ID NO: 2157 - RNA, 22 nt, Homo sapiens
acucggcguggcgucggucgug

SEQ ID NO: 2158 - RNA, 22 nt, Homo sapiens
cacgaccgacgccacgccgagu

SEQ ID NO: 2159 - RNA, 21 nt, Homo sapiens
ucgaccggaccucgaccggcu

SEQ ID NO: 2160 - RNA, 21 nt, Homo sapiens
agccggucgagguccggucga

SEQ ID NO: 2161 - RNA, 22 nt, Homo sapiens
ugagaacugaauuccauaggcu

SEQ ID NO: 2162 - RNA, 22 nt, Homo sapiens
agccuauggaauucaguucuca

SEQ ID NO: 2163 - RNA, 22 nt, Homo sapiens
aaucauacacgguugaccuauu

SEQ ID NO: 2164 - RNA, 22 nt, Homo sapiens
aauaggucaaccguguaugauu

SEQ ID NO: 2165 - RNA, 22 nt, Homo sapiens
uagguuauccguguugccuucg

SEQ ID NO: 2166 - RNA, 22 nt, Homo sapiens
cgaaggcaacacggauaaccua

SEQ ID NO: 2167 - RNA, 21 nt, Homo sapiens
ccaguccugugccugccgccu

SEQ ID NO: 2168 - RNA, 21 nt, Homo sapiens
aggcggcaggcacaggacugg

SEQ ID NO: 2169 - RNA, 22 nt, Homo sapiens
ucugcccccuccgcugcugcca

SEQ ID NO: 2170 - RNA, 22 nt, Homo sapiens
uggcagcagcggagggggcaga

SEQ ID NO: 2171 - RNA, 22 nt, Homo sapiens
ggaggggucccgcacugggagg

SEQ ID NO: 2172 - RNA, 22 nt, Homo sapiens
ccucccagugcgggaccccucc

SEQ ID NO: 2173 - RNA, 22 nt, Homo sapiens
cccugugcccggcccacuucug

SEQ ID NO: 2174 - RNA, 22 nt, Homo sapiens
cagaagugggccgggcacaggg

SEQ ID NO: 2175 - RNA, 20 nt, Homo sapiens
ccccagggcgacgcggcggg

SEQ ID NO: 2176 - RNA, 20 nt, Homo sapiens
cccgccgcgucgcccugggg

SEQ ID NO: 2177 - RNA, 22 nt, Homo sapiens
accuugccuugcugcccgggcc

SEQ ID NO: 2178 - RNA, 22 nt, Homo sapiens
ggcccgggcagcaaggcaaggu

SEQ ID NO: 2179 - RNA, 21 nt, Homo sapiens
auuugugcuuggcucugucac

SEQ ID NO: 2180 - RNA, 21 nt, Homo sapiens
gugacagagccaagcacaaau

SEQ ID NO: 2181 - RNA, 22 nt, Homo sapiens
auuguccuugcuguuuggagau

SEQ ID NO: 2182 - RNA, 22 nt, Homo sapiens
aucuccaaacagcaaggacaau

SEQ ID NO: 2183 - RNA, 21 nt, Homo sapiens
auccccagauacaauggacaa

SEQ ID NO: 2184 - RNA, 21 nt, Homo sapiens
uuguccauuguaucuggggau

SEQ ID NO: 2185 - RNA, 23 nt, Homo sapiens
cagugcaauaguauugucaaagc

SEQ ID NO: 2186 - RNA, 23 nt, Homo sapiens
gcuuugacaauacuauugcacug

SEQ ID NO: 2187 - RNA, 22 nt, Homo sapiens
gcucugacuuuauugcacuacu

SEQ ID NO: 2188 - RNA, 22 nt, Homo sapiens
aguagugcaauaaagucagagc

SEQ ID NO: 2189 - RNA, 23 nt, Homo sapiens
uaagugcuuccauguuuuaguag

SEQ ID NO: 2190 - RNA, 23 nt, Homo sapiens
cuacuaaaacauggaagcacuua

SEQ ID NO: 2191 - RNA, 22 nt, Homo sapiens
acuuuaacauggaagugcuuuc

SEQ ID NO: 2192 - RNA, 22 nt, Homo sapiens
gaaagcacuuccauguuaaagu

SEQ ID NO: 2193 - RNA, 23 nt, Homo sapiens
uaagugcuuccauguuucagugg

SEQ ID NO: 2194 - RNA, 23 nt, Homo sapiens
ccacugaaacauggaagcacuua

SEQ ID NO: 2195 - RNA, 22 nt, Homo sapiens
uuuaacauggggguaccugcug

SEQ ID NO: 2196 - RNA, 22 nt, Homo sapiens
cagcagguacccccauguuaaa

SEQ ID NO: 2197 - RNA, 23 nt, Homo sapiens
uaagugcuuccauguuugagugu

SEQ ID NO: 2198 - RNA, 23 nt, Homo sapiens
acacucaaacauggaagcacuua

SEQ ID NO: 2199 - RNA, 22 nt, Homo sapiens
acuuuaacauggaggcacuugc

SEQ ID NO: 2200 - RNA, 22 nt, Homo sapiens
gcaagugccuccauguuaaagu

SEQ ID NO: 2201 - RNA, 22 nt, Homo sapiens
aauugcacuuuagcaaugguga

SEQ ID NO: 2202 - RNA, 22 nt, Homo sapiens
ucaccauugcuaaagugcaauu

SEQ ID NO: 2203 - RNA, 22 nt, Homo sapiens
acuguugcuaauaugcaacucu

SEQ ID NO: 2204 - RNA, 22 nt, Homo sapiens
agaguugcauauuagcaacagu

SEQ ID NO: 2205 - RNA, 23 nt, Homo sapiens
agcucggucugaggccccucagu

SEQ ID NO: 2206 - RNA, 23 nt, Homo sapiens
acugaggggccucagaccgagcu

SEQ ID NO: 2207 - RNA, 22 nt, Homo sapiens
aaaaacugagacuacuuuugca

SEQ ID NO: 2208 - RNA, 22 nt, Homo sapiens
ugcaaaaguagucucaguuuuu

SEQ ID NO: 2209 - RNA, 19 nt, Homo sapiens
aaaaacuguaauuacuuuu

SEQ ID NO: 2210 - RNA, 19 nt, Homo sapiens
aaaaguaauuacaguuuuu

SEQ ID NO: 2211 - RNA, 22 nt, Homo sapiens
aaaacuguaauuacuuuuguac

SEQ ID NO: 2212 - RNA, 22 nt, Homo sapiens
guacaaaaguaauuacaguuuu

SEQ ID NO: 2213 - RNA, 23 nt, Homo sapiens
ugcaaaaguaauugcaguuuuug

SEQ ID NO: 2214 - RNA, 23 nt, Homo sapiens
caaaaacugcaauuacuuuugca

SEQ ID NO: 2215 - RNA, 23 nt, Homo sapiens
caaaaaccgcaauuacuuuugca

SEQ ID NO: 2216 - RNA, 23 nt, Homo sapiens
ugcaaaaguaauugcgguuuuug

SEQ ID NO: 2217 - RNA, 22 nt, Homo sapiens
aaaaguaaucgcgguuuuuguc

SEQ ID NO: 2218 - RNA, 22 nt, Homo sapiens
gacaaaaaccgcgauuacuuuu

SEQ ID NO: 2219 - RNA, 22 nt, Homo sapiens
aaaaguacuugcggauuuugcu

SEQ ID NO: 2220 - RNA, 22 nt, Homo sapiens
agcaaaauccgcaaguacuuuu

SEQ ID NO: 2221 - RNA, 22 nt, Homo sapiens
aaaaguauuugcggguuuuguc

SEQ ID NO: 2222 - RNA, 22 nt, Homo sapiens
gacaaaacccgcaaauacuuuu

SEQ ID NO: 2223 - RNA, 21 nt, Homo sapiens
caaagguauuugugguuuuug

SEQ ID NO: 2224 - RNA, 21 nt, Homo sapiens
caaaaaccacaaauaccuuug

SEQ ID NO: 2225 - RNA, 22 nt, Homo sapiens
ccaaaacugcaguuacuuuugc

SEQ ID NO: 2226 - RNA, 22 nt, Homo sapiens
gcaaaaguaacugcaguuuugg

SEQ ID NO: 2227 - RNA, 22 nt, Homo sapiens
aaaaguaauugcgguuuuugcc

SEQ ID NO: 2228 - RNA, 22 nt, Homo sapiens
ggcaaaaaccgcaauuacuuuu

SEQ ID NO: 2229 - RNA, 22 nt, Homo sapiens
uagcaaaaacugcaguuacuuu

SEQ ID NO: 2230 - RNA, 22 nt, Homo sapiens
aaaguaacugcaguuuuugcua

SEQ ID NO: 2231 - RNA, 20 nt, Homo sapiens
ggagguugggaagggcagag

SEQ ID NO: 2232 - RNA, 20 nt, Homo sapiens
cucugcccuucccaaccucc

SEQ ID NO: 2233 - RNA, 18 nt, Homo sapiens
ugaggcgggggggcgagc

SEQ ID NO: 2234 - RNA, 18 nt, Homo sapiens
gcucgcccccccgccuca

SEQ ID NO: 2235 - RNA, 20 nt, Homo sapiens
agagaugaagcgggggggcg

SEQ ID NO: 2236 - RNA, 20 nt, Homo sapiens
cgcccccccgcuucaucucu

SEQ ID NO: 2237 - RNA, 24 nt, Homo sapiens
ggaggccgggguggggcggggcgg

SEQ ID NO: 2238 - RNA, 24 nt, Homo sapiens
ccgccccgccccaccccggccucc

SEQ ID NO: 2239 - RNA, 19 nt, Homo sapiens
ggggagcgaggggcggggc

SEQ ID NO: 2240 - RNA, 19 nt, Homo sapiens
gccccgccccucgcucccc

SEQ ID NO: 2241 - RNA, 23 nt, Homo sapiens
uauucauuuauccccagccuaca

SEQ ID NO: 2242 - RNA, 23 nt, Homo sapiens
uguaggcuggggauaaaugaaua

SEQ ID NO: 2243 - RNA, 24 nt, Homo sapiens
acuggcuagggaaaaugauuggau

SEQ ID NO: 2244 - RNA, 24 nt, Homo sapiens
auccaaucauuuucccuagccagu

SEQ ID NO: 2245 - RNA, 22 nt, Homo sapiens
uucauuugccucccagccuaca

SEQ ID NO: 2246 - RNA, 22 nt, Homo sapiens
uguaggcugggaggcaaaugaa

SEQ ID NO: 2247 - RNA, 24 nt, Homo sapiens
ugggcuaagggagaugauugggua

SEQ ID NO: 2248 - RNA, 24 nt, Homo sapiens
uacccaaucaucucccuuagccca

SEQ ID NO: 2249 - RNA, 22 nt, Homo sapiens
acuccagccccacagccucagc

SEQ ID NO: 2250 - RNA, 22 nt, Homo sapiens
gcugaggcuguggggcuggagu

SEQ ID NO: 2251 - RNA, 22 nt, Homo sapiens
aggaggaauuggugcuggucuu

SEQ ID NO: 2252 - RNA, 22 nt, Homo sapiens
aagaccagcaccaauuccuccu

SEQ ID NO: 2253 - RNA, 22 nt, Homo sapiens
aggcagcgggguguaguggaua

SEQ ID NO: 2254 - RNA, 22 nt, Homo sapiens
uauccacuacaccccgcugccu

SEQ ID NO: 2255 - RNA, 22 nt, Homo sapiens
uccauuacacuacccugccucu

SEQ ID NO: 2256 - RNA, 22 nt, Homo sapiens
agaggcaggguaguguaaugga

SEQ ID NO: 2257 - RNA, 22 nt, Homo sapiens
acugcugagcuagcacuucccg

SEQ ID NO: 2258 - RNA, 22 nt, Homo sapiens
cgggaagugcuagcucagcagu

SEQ ID NO: 2259 - RNA, 23 nt, Homo sapiens
caaagugcuguucgugcagguag

SEQ ID NO: 2260 - RNA, 23 nt, Homo sapiens
cuaccugcacgaacagcacuuug

SEQ ID NO: 2261 - RNA, 23 nt, Homo sapiens
cacccggcugugugcacaugugc

SEQ ID NO: 2262 - RNA, 23 nt, Homo sapiens
gcacaugugcacacagccgggug

SEQ ID NO: 2263 - RNA, 23 nt, Homo sapiens
agcuucuuuacagugcugccuug

SEQ ID NO: 2264 - RNA, 23 nt, Homo sapiens
caaggcagcacuguaaagaagcu

SEQ ID NO: 2265 - RNA, 23 nt, Homo sapiens
agcagcauuguacagggcuauga

SEQ ID NO: 2266 - RNA, 23 nt, Homo sapiens
ucauagcccuguacaaugcugcu

SEQ ID NO: 2267 - RNA, 17 nt, Homo sapiens
ccugagaaaagggccaa

SEQ ID NO: 2268 - RNA, 17 nt, Homo sapiens
uuggcccuuuucucagg

SEQ ID NO: 2269 - RNA, 19 nt, Homo sapiens
ggccacugagucagcacca

SEQ ID NO: 2270 - RNA, 19 nt, Homo sapiens
uggugcugacucaguggcc

SEQ ID NO: 2271 - RNA, 18 nt, Homo sapiens
agggcauguccagggggu

SEQ ID NO: 2272 - RNA, 18 nt, Homo sapiens
acccccuggacaugcccu

SEQ ID NO: 2273 - RNA, 23 nt, Homo sapiens
gccuggagcuacuccaccaucuc

SEQ ID NO: 2274 - RNA, 23 nt, Homo sapiens
gagaugguggaguagcuccaggc

SEQ ID NO: 2275 - RNA, 17 nt, Homo sapiens
caguguucagagaugga

SEQ ID NO: 2276 - RNA, 17 nt, Homo sapiens
uccaucucugaacacug

SEQ ID NO: 2277 - RNA, 18 nt, Homo sapiens
aucugaccugaugaaggu

SEQ ID NO: 2278 - RNA, 18 nt, Homo sapiens
accuucaucaggucagau

SEQ ID NO: 2279 - RNA, 18 nt, Homo sapiens
ccagagguggggacugag

SEQ ID NO: 2280 - RNA, 18 nt, Homo sapiens
cucaguccccaccucugg

SEQ ID NO: 2281 - RNA, 17 nt, Homo sapiens
ccccgccaccgccuugg

SEQ ID NO: 2282 - RNA, 17 nt, Homo sapiens
ccaaggcgguggcgggg

SEQ ID NO: 2283 - RNA, 22 nt, Homo sapiens
caguugggucuaggggucagga

SEQ ID NO: 2284 - RNA, 22 nt, Homo sapiens
uccugaccccuagacccaacug

SEQ ID NO: 2285 - RNA, 19 nt, Homo sapiens
cuuggggcauggaguccca

SEQ ID NO: 2286 - RNA, 19 nt, Homo sapiens
ugggacuccaugccccaag

SEQ ID NO: 2287 - RNA, 16 nt, Homo sapiens
aggaaacagggaccca

SEQ ID NO: 2288 - RNA, 16 nt, Homo sapiens
ugggucccuguuuccu

SEQ ID NO: 2289 - RNA, 17 nt, Homo sapiens
gacauucagacuaccug

SEQ ID NO: 2290 - RNA, 17 nt, Homo sapiens
cagguagucugaauguc

SEQ ID NO: 2291 - RNA, 18 nt, Homo sapiens
auucuaagugccuuggcc

SEQ ID NO: 2292 - RNA, 18 nt, Homo sapiens
ggccaaggcacuuagaau

SEQ ID NO: 2293 - RNA, 17 nt, Homo sapiens
acucagucauggucauu

SEQ ID NO: 2294 - RNA, 17 nt, Homo sapiens
aaugaccaugacugagu

SEQ ID NO: 2295 - RNA, 19 nt, Homo sapiens
cugugggcucagcucuggg

SEQ ID NO: 2296 - RNA, 19 nt, Homo sapiens
cccagagcugagcccacag

SEQ ID NO: 2297 - RNA, 16 nt, Homo sapiens
cuaggaggccuuggcc

SEQ ID NO: 2298 - RNA, 16 nt, Homo sapiens
ggccaaggccuccuag

SEQ ID NO: 2299 - RNA, 16 nt, Homo sapiens
uccagcucgguggcac

SEQ ID NO: 2300 - RNA, 16 nt, Homo sapiens
gugccaccgagcugga

SEQ ID NO: 2301 - RNA, 21 nt, Homo sapiens
ggcuccuccucucaggaugug

SEQ ID NO: 2302 - RNA, 21 nt, Homo sapiens
cacauccugagaggaggagcc

SEQ ID NO: 2303 - RNA, 21 nt, Homo sapiens
gcaggcacagacagcccuggc

SEQ ID NO: 2304 - RNA, 21 nt, Homo sapiens
gccagggcugucugugccugc

SEQ ID NO: 2305 - RNA, 20 nt, Homo sapiens
ucagggagucaggggagggc

SEQ ID NO: 2306 - RNA, 20 nt, Homo sapiens
gcccuccccugacucccuga

SEQ ID NO: 2307 - RNA, 19 nt, Homo sapiens
gggggaagaaaaggugggg

SEQ ID NO: 2308 - RNA, 19 nt, Homo sapiens
ccccaccuuuucuuccccc

SEQ ID NO: 2309 - RNA, 18 nt, Homo sapiens
cauucaacuagugauugu

SEQ ID NO: 2310 - RNA, 18 nt, Homo sapiens
acaaucacuaguugaaug

SEQ ID NO: 2311 - RNA, 18 nt, Homo sapiens
cagcagucccucccccug

SEQ ID NO: 2312 - RNA, 18 nt, Homo sapiens
cagggggagggacugcug

SEQ ID NO: 2313 - RNA, 17 nt, Homo sapiens
ccaauuaccacuucuuu

SEQ ID NO: 2314 - RNA, 17 nt, Homo sapiens
aaagaagugguaauugg

SEQ ID NO: 2315 - RNA, 17 nt, Homo sapiens
cucagugacucaugugc

SEQ ID NO: 2316 - RNA, 17 nt, Homo sapiens
gcacaugagucacugag

SEQ ID NO: 2317 - RNA, 21 nt, Homo sapiens
gcaguucugagcacaguacac

SEQ ID NO: 2318 - RNA, 21 nt, Homo sapiens
guguacugugcucagaacugc

SEQ ID NO: 2319 - RNA, 18 nt, Homo sapiens
cuaggggguuugcccuug

SEQ ID NO: 2320 - RNA, 18 nt, Homo sapiens
caagggcaaacccccuag

SEQ ID NO: 2321 - RNA, 16 nt, Homo sapiens
cucuccucccggcuuc

SEQ ID NO: 2322 - RNA, 16 nt, Homo sapiens
gaagccgggaggagag

SEQ ID NO: 2323 - RNA, 21 nt, Homo sapiens
gaguguaguucugagcagagc

SEQ ID NO: 2324 - RNA, 21 nt, Homo sapiens
gcucugcucagaacuacacuc

SEQ ID NO: 2325 - RNA, 18 nt, Homo sapiens
gggucccggggagggggg

SEQ ID NO: 2326 - RNA, 18 nt, Homo sapiens
ccccccuccccgggaccc

SEQ ID NO: 2327 - RNA, 18 nt, Homo sapiens
uaaaauuugcauccagga

SEQ ID NO: 2328 - RNA, 18 nt, Homo sapiens
uccuggaugcaaauuuua

SEQ ID NO: 2329 - RNA, 17 nt, Homo sapiens
uggggcucagcgaguuu

SEQ ID NO: 2330 - RNA, 17 nt, Homo sapiens
aaacucgcugagcccca

SEQ ID NO: 2331 - RNA, 18 nt, Homo sapiens
gggcucacaucaccccau

SEQ ID NO: 2332 - RNA, 18 nt, Homo sapiens
auggggugaugugagccc

SEQ ID NO: 2333 - RNA, 18 nt, Homo sapiens
gcggcgaguccgacucau

SEQ ID NO: 2334 - RNA, 18 nt, Homo sapiens
augagucggacucgccgc

SEQ ID NO: 2335 - RNA, 17 nt, Homo sapiens
accccacuccugguacc

SEQ ID NO: 2336 - RNA, 17 nt, Homo sapiens
gguaccaggaguggggu

SEQ ID NO: 2337 - RNA, 19 nt, Homo sapiens
ucucccuugagggcacuuu

SEQ ID NO: 2338 - RNA, 19 nt, Homo sapiens
aaagugcccucaagggaga

SEQ ID NO: 2339 - RNA, 17 nt, Homo sapiens
uugucugcugaguuucc

SEQ ID NO: 2340 - RNA, 17 nt, Homo sapiens
ggaaacucagcagacaa

SEQ ID NO: 2341 - RNA, 19 nt, Homo sapiens
gcauugugcagggcuauca

SEQ ID NO: 2342 - RNA, 19 nt, Homo sapiens
ugauagcccugcacaaugc

SEQ ID NO: 2343 - RNA, 19 nt, Homo sapiens
ugcccuccuuucuucccuc

SEQ ID NO: 2344 - RNA, 19 nt, Homo sapiens
gagggaagaaaggagggca

SEQ ID NO: 2345 - RNA, 16 nt, Homo sapiens
uucagcaggaacagcu

SEQ ID NO: 2346 - RNA, 16 nt, Homo sapiens
agcuguuccugcugaa

SEQ ID NO: 2347 - RNA, 18 nt, Homo sapiens
ccccugggccggccuugg

SEQ ID NO: 2348 - RNA, 18 nt, Homo sapiens
ccaaggccggcccagggg

SEQ ID NO: 2349 - RNA, 17 nt, Homo sapiens
cagccugacaggaacag

SEQ ID NO: 2350 - RNA, 17 nt, Homo sapiens
cuguuccugucaggcug

SEQ ID NO: 2351 - RNA, 17 nt, Homo sapiens
gggagucuacagcaggg

SEQ ID NO: 2352 - RNA, 17 nt, Homo sapiens
cccugcuguagacuccc

SEQ ID NO: 2353 - RNA, 18 nt, Homo sapiens
cagugcaauguuuuccuu

SEQ ID NO: 2354 - RNA, 18 nt, Homo sapiens
aaggaaaacauugcacug

SEQ ID NO: 2355 - RNA, 17 nt, Homo sapiens
augugggcucaggcuca

SEQ ID NO: 2356 - RNA, 17 nt, Homo sapiens
ugagccugagcccacau

SEQ ID NO: 2357 - RNA, 16 nt, Homo sapiens
ugccuuccugucugug

SEQ ID NO: 2358 - RNA, 16 nt, Homo sapiens
cacagacaggaaggca

SEQ ID NO: 2359 - RNA, 22 nt, Homo sapiens
cugggacaggaggaggaggcag

SEQ ID NO: 2360 - RNA, 22 nt, Homo sapiens
cugccuccuccuccugucccag

SEQ ID NO: 2361 - RNA, 18 nt, Homo sapiens
gcuggugacaugagaggc

SEQ ID NO: 2362 - RNA, 18 nt, Homo sapiens
gccucucaugucaccagc

SEQ ID NO: 2363 - RNA, 18 nt, Homo sapiens
ugggagcuggacuacuuc

SEQ ID NO: 2364 - RNA, 18 nt, Homo sapiens
gaaguaguccagcuccca

SEQ ID NO: 2365 - RNA, 20 nt, Homo sapiens
ucccacuacuucacuuguga

SEQ ID NO: 2366 - RNA, 20 nt, Homo sapiens
ucacaagugaaguaguggga

SEQ ID NO: 2367 - RNA, 18 nt, Homo sapiens
ccaguguggcucagcgag

SEQ ID NO: 2368 - RNA, 18 nt, Homo sapiens
cucgcugagccacacugg

SEQ ID NO: 2369 - RNA, 17 nt, Homo sapiens
uucugagcugaggacag

SEQ ID NO: 2370 - RNA, 17 nt, Homo sapiens
cuguccucagcucagaa

SEQ ID NO: 2371 - RNA, 17 nt, Homo sapiens
ccggcauguccagggca

SEQ ID NO: 2372 - RNA, 17 nt, Homo sapiens
ugcccuggacaugccgg

SEQ ID NO: 2373 - RNA, 18 nt, Homo sapiens
ccuagacaccuccaguuc

SEQ ID NO: 2374 - RNA, 18 nt, Homo sapiens
gaacuggaggugucuagg

SEQ ID NO: 2375 - RNA, 17 nt, Homo sapiens
uggagagaaaggcagua

SEQ ID NO: 2376 - RNA, 17 nt, Homo sapiens
uacugccuuucucucca

SEQ ID NO: 2377 - RNA, 19 nt, Homo sapiens
aauguuuuuuccuguuucc

SEQ ID NO: 2378 - RNA, 19 nt, Homo sapiens
ggaaacaggaaaaaacauu

SEQ ID NO: 2379 - RNA, 18 nt, Homo sapiens
ucccuggaguuucuucuu

SEQ ID NO: 2380 - RNA, 18 nt, Homo sapiens
aagaagaaacuccaggga

SEQ ID NO: 2381 - RNA, 18 nt, Homo sapiens
cuggagucuaggauucca

SEQ ID NO: 2382 - RNA, 18 nt, Homo sapiens
uggaauccuagacuccag

SEQ ID NO: 2383 - RNA, 16 nt, Homo sapiens
gcagcauucauguccc

SEQ ID NO: 2384 - RNA, 16 nt, Homo sapiens
gggacaugaaugcugc

SEQ ID NO: 2385 - RNA, 18 nt, Homo sapiens
gaaagagagcugagugug

SEQ ID NO: 2386 - RNA, 18 nt, Homo sapiens
cacacucagcucucuuuc

SEQ ID NO: 2387 - RNA, 19 nt, Homo sapiens
ggccuuguuccugucccca

SEQ ID NO: 2388 - RNA, 19 nt, Homo sapiens
uggggacaggaacaaggcc

SEQ ID NO: 2389 - RNA, 20 nt, Homo sapiens
agcccccuggccccaaaccc

SEQ ID NO: 2390 - RNA, 20 nt, Homo sapiens
ggguuuggggccagggggcu

SEQ ID NO: 2391 - RNA, 18 nt, Homo sapiens
cucugggaaaugggacag

SEQ ID NO: 2392 - RNA, 18 nt, Homo sapiens
cugucccauuucccagag

SEQ ID NO: 2393 - RNA, 18 nt, Homo sapiens
ccgcuuucugagcuggac

SEQ ID NO: 2394 - RNA, 18 nt, Homo sapiens
guccagcucagaaagcgg

SEQ ID NO: 2395 - RNA, 17 nt, Homo sapiens
ggugaggcuagcuggug

SEQ ID NO: 2396 - RNA, 17 nt, Homo sapiens
caccagcuagccucacc

SEQ ID NO: 2397 - RNA, 17 nt, Homo sapiens
acauugccagggaguuu

SEQ ID NO: 2398 - RNA, 17 nt, Homo sapiens
aaacucccuggcaaugu

SEQ ID NO: 2399 - RNA, 17 nt, Homo sapiens
cacuguggguacaugcu

SEQ ID NO: 2400 - RNA, 17 nt, Homo sapiens
agcauguacccacagug

SEQ ID NO: 2401 - RNA, 17 nt, Homo sapiens
ucccugagcaaagccac

SEQ ID NO: 2402 - RNA, 17 nt, Homo sapiens
guggcuuugcucaggga

SEQ ID NO: 2403 - RNA, 18 nt, Homo sapiens
gggauucuguagcuuccu

SEQ ID NO: 2404 - RNA, 18 nt, Homo sapiens
aggaagcuacagaauccc

SEQ ID NO: 2405 - RNA, 21 nt, Homo sapiens
uuagcgguggaccgcccugcg

SEQ ID NO: 2406 - RNA, 21 nt, Homo sapiens
cgcagggcgguccaccgcuaa

SEQ ID NO: 2407 - RNA, 21 nt, Homo sapiens
cugugggcucagcgcgugggg

SEQ ID NO: 2408 - RNA, 21 nt, Homo sapiens
ccccacgcgcugagcccacag

SEQ ID NO: 2409 - RNA, 18 nt, Homo sapiens
cagccccacagccucaga

SEQ ID NO: 2410 - RNA, 18 nt, Homo sapiens
ucugaggcuguggggcug

SEQ ID NO: 2411 - RNA, 20 nt, Homo sapiens
cccugagacccuaaccuuaa

SEQ ID NO: 2412 - RNA, 20 nt, Homo sapiens
uuaagguuagggucucaggg

SEQ ID NO: 2413 - RNA, 18 nt, Homo sapiens
uugcacuugucucaguga

SEQ ID NO: 2414 - RNA, 18 nt, Homo sapiens
ucacugagacaagugcaa

SEQ ID NO: 2415 - RNA, 20 nt, Homo sapiens
uguuccucugucucccagac

SEQ ID NO: 2416 - RNA, 20 nt, Homo sapiens
gucugggagacagaggaaca

SEQ ID NO: 2417 - RNA, 19 nt, Homo sapiens
ggcuugcaugggggacugg

SEQ ID NO: 2418 - RNA, 19 nt, Homo sapiens
ccagucccccaugcaagcc

SEQ ID NO: 2419 - RNA, 17 nt, Homo sapiens
ccaguuuucccaggauu

SEQ ID NO: 2420 - RNA, 17 nt, Homo sapiens
aauccugggaaaacugg

SEQ ID NO: 2421 - RNA, 19 nt, Homo sapiens
ccugagacccuaguuccac

SEQ ID NO: 2422 - RNA, 19 nt, Homo sapiens
guggaacuagggucucagg

SEQ ID NO: 2423 - RNA, 19 nt, Homo sapiens
ccucagaucagagccuugc

SEQ ID NO: 2424 - RNA, 19 nt, Homo sapiens
gcaaggcucugaucugagg

SEQ ID NO: 2425 - RNA, 22 nt, Homo sapiens
cauugcacuugucucggucuga

SEQ ID NO: 2426 - RNA, 22 nt, Homo sapiens
ucagaccgagacaagugcaaug

SEQ ID NO: 2427 - RNA, 21 nt, Homo sapiens
aggcggagacuugggcaauug

SEQ ID NO: 2428 - RNA, 21 nt, Homo sapiens
caauugcccaagucuccgccu

SEQ ID NO: 2429 - RNA, 22 nt, Homo sapiens
ccuauucuugguuacuugcacg

SEQ ID NO: 2430 - RNA, 22 nt, Homo sapiens
cgugcaaguaaccaagaauagg

SEQ ID NO: 2431 - RNA, 19 nt, Homo sapiens
aauggauuuuuggagcagg

SEQ ID NO: 2432 - RNA, 19 nt, Homo sapiens
ccugcuccaaaaauccauu

SEQ ID NO: 2433 - RNA, 22 nt, Homo sapiens
ugcggggcuagggcuaacagca

SEQ ID NO: 2434 - RNA, 22 nt, Homo sapiens
ugcuguuagcccuagccccgca

SEQ ID NO: 2435 - RNA, 22 nt, Homo sapiens
aaaaguaauugcggauuuugcc

SEQ ID NO: 2436 - RNA, 22 nt, Homo sapiens
ggcaaaauccgcaauuacuuuu

SEQ ID NO: 2437 - RNA, 22 nt, Homo sapiens
caaaaguaauuguggauuuugu

SEQ ID NO: 2438 - RNA, 22 nt, Homo sapiens
acaaaauccacaauuacuuuug

SEQ ID NO: 2439 - RNA, 23 nt, Homo sapiens
uaagugcuuccauguuuugguga

SEQ ID NO: 2440 - RNA, 23 nt, Homo sapiens
ucaccaaaacauggaagcacuua

SEQ ID NO: 2441 - RNA, 23 nt, Homo sapiens
acuuaaacguggauguacuugcu

SEQ ID NO: 2442 - RNA, 23 nt, Homo sapiens
agcaaguacauccacguuuaagu

SEQ ID NO: 2443 - RNA, 21 nt, Homo sapiens
cuauacaaucuacugucuuuc

SEQ ID NO: 2444 - RNA, 21 nt, Homo sapiens
gaaagacaguagauuguauag

SEQ ID NO: 2445 - RNA, 22 nt, Homo sapiens
ugagguaguagguuguauaguu

SEQ ID NO: 2446 - RNA, 22 nt, Homo sapiens
aacuauacaaccuacuaccuca

SEQ ID NO: 2447 - RNA, 22 nt, Homo sapiens
cuguacagccuccuagcuuucc

SEQ ID NO: 2448 - RNA, 22 nt, Homo sapiens
ggaaagcuaggaggcuguacag

SEQ ID NO: 2449 - RNA, 20 nt, Homo sapiens
caccaggcauuguggucucc

SEQ ID NO: 2450 - RNA, 20 nt, Homo sapiens
ggagaccacaaugccuggug

SEQ ID NO: 2451 - RNA, 23 nt, Homo sapiens
ugaguaccgccaugucuguuggg

SEQ ID NO: 2452 - RNA, 23 nt, Homo sapiens
cccaacagacauggcgguacuca

SEQ ID NO: 2453 - RNA, 22 nt, Homo sapiens
uacccagagcaugcagugugaa

SEQ ID NO: 2454 - RNA, 22 nt, Homo sapiens
uucacacugcaugcucugggua

SEQ ID NO: 2455 - RNA, 22 nt, Homo sapiens
aagugcugucauagcugagguc

SEQ ID NO: 2456 - RNA, 22 nt, Homo sapiens
gaccucagcuaugacagcacuu

SEQ ID NO: 2457 - RNA, 23 nt, Homo sapiens
cacucagccuugagggcacuuuc

SEQ ID NO: 2458 - RNA, 23 nt, Homo sapiens
gaaagugcccucaaggcugagug

SEQ ID NO: 2459 - RNA, 22 nt, Homo sapiens
ucgacagcacgacacugccuuc

SEQ ID NO: 2460 - RNA, 22 nt, Homo sapiens
gaaggcagugucgugcugucga

SEQ ID NO: 2461 - RNA, 22 nt, Homo sapiens
uagguaguuuccuguuguuggg

SEQ ID NO: 2462 - RNA, 22 nt, Homo sapiens
cccaacaacaggaaacuaccua

SEQ ID NO: 2463 - RNA, 21 nt, Homo sapiens
uacaguacugugauaacugaa

SEQ ID NO: 2464 - RNA, 21 nt, Homo sapiens
uucaguuaucacaguacugua

SEQ ID NO: 2465 - RNA, 22 nt, Homo sapiens
caguuaucacagugcugaugcu

SEQ ID NO: 2466 - RNA, 22 nt, Homo sapiens
agcaucagcacugugauaacug

SEQ ID NO: 2467 - RNA, 23 nt, Homo sapiens
ugugcaaaucuaugcaaaacuga

SEQ ID NO: 2468 - RNA, 23 nt, Homo sapiens
ucaguuuugcauagauuugcaca

SEQ ID NO: 2469 - RNA, 22 nt, Homo sapiens
aguuuugcauaguugcacuaca

SEQ ID NO: 2470 - RNA, 22 nt, Homo sapiens
uguagugcaacuaugcaaaacu

SEQ ID NO: 2471 - RNA, 23 nt, Homo sapiens
aguuuugcagguuugcauccagc

SEQ ID NO: 2472 - RNA, 23 nt, Homo sapiens
gcuggaugcaaaccugcaaaacu

SEQ ID NO: 2473 - RNA, 22 nt, Homo sapiens
aguuuugcagguuugcauuuca

SEQ ID NO: 2474 - RNA, 22 nt, Homo sapiens
ugaaaugcaaaccugcaaaacu

SEQ ID NO: 2475 - RNA, 23 nt, Homo sapiens
ugugcaaauccaugcaaaacuga

SEQ ID NO: 2476 - RNA, 23 nt, Homo sapiens
ucaguuuugcauggauuugcaca

SEQ ID NO: 2477 - RNA, 23 nt, Homo sapiens
uacugcaucaggaacugauugga

SEQ ID NO: 2478 - RNA, 23 nt, Homo sapiens
uccaaucaguuccugaugcagua

SEQ ID NO: 2479 - RNA, 22 nt, Homo sapiens
augguuccgucaagcaccaugg

SEQ ID NO: 2480 - RNA, 22 nt, Homo sapiens
ccauggugcuugacggaaccau

SEQ ID NO: 2481 - RNA, 21 nt, Homo sapiens
agcuacaucuggcuacugggu

SEQ ID NO: 2482 - RNA, 21 nt, Homo sapiens
acccaguagccagauguagcu

SEQ ID NO: 2483 - RNA, 22 nt, Homo sapiens
cucaguagccaguguagauccu

SEQ ID NO: 2484 - RNA, 22 nt, Homo sapiens
aggaucuacacuggcuacugag

SEQ ID NO: 2485 - RNA, 22 nt, Homo sapiens
uuaucagaaucuccagggguac

SEQ ID NO: 2486 - RNA, 22 nt, Homo sapiens
guaccccuggagauucugauaa

SEQ ID NO: 2487 - RNA, 23 nt, Homo sapiens
aucaacagacauuaauugggcgc

SEQ ID NO: 2488 - RNA, 23 nt, Homo sapiens
gcgcccaauuaaugucuguugau

SEQ ID NO: 2489 - RNA, 21 nt, Homo sapiens
caaaacgugaggcgcugcuau

SEQ ID NO: 2490 - RNA, 21 nt, Homo sapiens
auagcagcgccucacguuuug

SEQ ID NO: 2491 - RNA, 22 nt, Homo sapiens
cagcagcaauucauguuuugaa

SEQ ID NO: 2492 - RNA, 22 nt, Homo sapiens
uucaaaacaugaauugcugcug

SEQ ID NO: 2493 - RNA, 18 nt, Homo sapiens
uucacagggaggugucau

SEQ ID NO: 2494 - RNA, 18 nt, Homo sapiens
augacaccucccugugaa

SEQ ID NO: 2495 - RNA, 20 nt, Homo sapiens
gcggagagagaauggggagc

SEQ ID NO: 2496 - RNA, 20 nt, Homo sapiens
gcuccccauucucucuccgc

SEQ ID NO: 2497 - RNA, 21 nt, Homo sapiens
ccugcgagucuccggcggugg

SEQ ID NO: 2498 - RNA, 21 nt, Homo sapiens
ccaccgccggagacucgcagg

SEQ ID NO: 2499 - RNA, 21 nt, Homo sapiens
gggcuagggccugcugccccc

SEQ ID NO: 2500 - RNA, 21 nt, Homo sapiens
gggggcagcaggcccuagccc

SEQ ID NO: 2501 - RNA, 19 nt, Homo sapiens
uucugcugccggccaaggc

SEQ ID NO: 2502 - RNA, 19 nt, Homo sapiens
gccuuggccggcagcagaa

SEQ ID NO: 2503 - RNA, 22 nt, Homo sapiens
uccucaucacacugcaccuuag

SEQ ID NO: 2504 - RNA, 22 nt, Homo sapiens
cuaaggugcagugugaugagga

SEQ ID NO: 2505 - RNA, 20 nt, Homo sapiens
gguagugaguuaucagcuac

SEQ ID NO: 2506 - RNA, 20 nt, Homo sapiens
guagcugauaacucacuacc

SEQ ID NO: 2507 - RNA, 20 nt, Homo sapiens
gauauucagaggcuaggugg

SEQ ID NO: 2508 - RNA, 20 nt, Homo sapiens
ccaccuagccucugaauauc

SEQ ID NO: 2509 - RNA, 21 nt, Homo sapiens
acggcccaggcggcauuggug

SEQ ID NO: 2510 - RNA, 21 nt, Homo sapiens
caccaaugccgccugggccgu

SEQ ID NO: 2511 - RNA, 21 nt, Homo sapiens
agcaugacagaggagaggugg

SEQ ID NO: 2512 - RNA, 21 nt, Homo sapiens
ccaccucuccucugucaugcu

SEQ ID NO: 2513 - RNA, 21 nt, Homo sapiens
gggaagagcuguacggccuuc

SEQ ID NO: 2514 - RNA, 21 nt, Homo sapiens
gaaggccguacagcucuuccc

SEQ ID NO: 2515 - RNA, 19 nt, Homo sapiens
ccgccugagcuagcugugg

SEQ ID NO: 2516 - RNA, 19 nt, Homo sapiens
ccacagcuagcucaggcgg

SEQ ID NO: 2517 - RNA, 24 nt, Homo sapiens
uuggaagcuuggaccaacuagcug

SEQ ID NO: 2518 - RNA, 24 nt, Homo sapiens
cagcuaguugguccaagcuuccaa

SEQ ID NO: 2519 - RNA, 19 nt, Homo sapiens
ucuagugcgggcguucccg

SEQ ID NO: 2520 - RNA, 19 nt, Homo sapiens
cgggaacgcccgcacuaga

SEQ ID NO: 2521 - RNA, 24 nt, Homo sapiens
aggagcagugccggccaaggcgcc

SEQ ID NO: 2522 - RNA, 24 nt, Homo sapiens
ggcgccuuggccggcacugcuccu

SEQ ID NO: 2523 - RNA, 19 nt, Homo sapiens
gaauacgucugguugaucc

SEQ ID NO: 2524 - RNA, 19 nt, Homo sapiens
ggaucaaccagacguauuc

SEQ ID NO: 2525 - RNA, 20 nt, Homo sapiens
cuuauaucagaggcuguggg

SEQ ID NO: 2526 - RNA, 20 nt, Homo sapiens
cccacagccucugauauaag

SEQ ID NO: 2527 - RNA, 20 nt, Homo sapiens
uuccgccagucgguggccgg

SEQ ID NO: 2528 - RNA, 20 nt, Homo sapiens
ccggccaccgacuggcggaa

SEQ ID NO: 2529 - RNA, 19 nt, Homo sapiens
aaggggcugggggagcaca

SEQ ID NO: 2530 - RNA, 19 nt, Homo sapiens
ugugcucccccagccccuu

SEQ ID NO: 2531 - RNA, 23 nt, Homo sapiens
agguugggaucgguugcaaugcu

SEQ ID NO: 2532 - RNA, 23 nt, Homo sapiens
agcauugcaaccgaucccaaccu

SEQ ID NO: 2533 - RNA, 22 nt, Homo sapiens
ggguggggauuuguugcauuac

SEQ ID NO: 2534 - RNA, 22 nt, Homo sapiens
guaaugcaacaaauccccaccc

SEQ ID NO: 2535 - RNA, 22 nt, Homo sapiens
uauugcacuugucccggccugu

SEQ ID NO: 2536 - RNA, 22 nt, Homo sapiens
acaggccgggacaagugcaaua

SEQ ID NO: 2537 - RNA, 22 nt, Homo sapiens
uauugcacucgucccggccucc

SEQ ID NO: 2538 - RNA, 22 nt, Homo sapiens
ggaggccgggacgagugcaaua

SEQ ID NO: 2539 - RNA, 22 nt, Homo sapiens
agggacgggacgcggugcagug

SEQ ID NO: 2540 - RNA, 22 nt, Homo sapiens
cacugcaccgcgucccgucccu

SEQ ID NO: 2541 - RNA, 21 nt, Homo sapiens
aucacauugccagggauuucc

SEQ ID NO: 2542 - RNA, 21 nt, Homo sapiens
ggaaaucccuggcaaugugau

SEQ ID NO: 2543 - RNA, 22 nt, Homo sapiens
gggguuccuggggaugggauuu

SEQ ID NO: 2544 - RNA, 22 nt, Homo sapiens
aaaucccauccccaggaacccc

SEQ ID NO: 2545 - RNA, 22 nt, Homo sapiens
acugcagugaaggcacuuguag

SEQ ID NO: 2546 - RNA, 22 nt, Homo sapiens
cuacaagugccuucacugcagu

SEQ ID NO: 2547 - RNA, 23 nt, Homo sapiens
agcuacauugucugcuggguuuc

SEQ ID NO: 2548 - RNA, 23 nt, Homo sapiens
gaaacccagcagacaauguagcu

SEQ ID NO: 2549 - RNA, 22 nt, Homo sapiens
accuggcauacaauguagauuu

SEQ ID NO: 2550 - RNA, 22 nt, Homo sapiens
aaaucuacauuguaugccaggu

SEQ ID NO: 2551 - RNA, 22 nt, Homo sapiens
ucguaccgugaguaauaaugcg

SEQ ID NO: 2552 - RNA, 22 nt, Homo sapiens
cgcauuauuacucacgguacga

SEQ ID NO: 2553 - RNA, 21 nt, Homo sapiens
cauuauuacuuuugguacgcg

SEQ ID NO: 2554 - RNA, 21 nt, Homo sapiens
cgcguaccaaaaguaauaaug

SEQ ID NO: 2555 - RNA, 23 nt, Homo sapiens
uacuccagagggcgucacucaug

SEQ ID NO: 2556 - RNA, 23 nt, Homo sapiens
caugagugacgcccucuggagua

SEQ ID NO: 2557 - RNA, 21 nt, Homo sapiens
ucccacguuguggcccagcag

SEQ ID NO: 2558 - RNA, 21 nt, Homo sapiens
cugcugggccacaacguggga

SEQ ID NO: 2559 - RNA, 23 nt, Homo sapiens
ccucaccaccccuucugccugca

SEQ ID NO: 2560 - RNA, 23 nt, Homo sapiens
ugcaggcagaagggguggugagg

SEQ ID NO: 2561 - RNA, 24 nt, Homo sapiens
cugcaggcagaaguggggcugaca

SEQ ID NO: 2562 - RNA, 24 nt, Homo sapiens
ugucagccccacuucugccugcag

SEQ ID NO: 2563 - RNA, 21 nt, Homo sapiens
ccaaaccagucgugccugugg

SEQ ID NO: 2564 - RNA, 21 nt, Homo sapiens
ccacaggcacgacugguuugg

SEQ ID NO: 2565 - RNA, 22 nt, Homo sapiens
cucaaaccggcugugccugugg

SEQ ID NO: 2566 - RNA, 22 nt, Homo sapiens
ccacaggcacagccgguuugag

SEQ ID NO: 2567 - RNA, 21 nt, Homo sapiens
acaggcacgacugguuuggca

SEQ ID NO: 2568 - RNA, 21 nt, Homo sapiens
ugccaaaccagucgugccugu

SEQ ID NO: 2569 - RNA, 22 nt, Homo sapiens
uccgaacucuccauuccucugc

SEQ ID NO: 2570 - RNA, 22 nt, Homo sapiens
gcagaggaauggagaguucgga

SEQ ID NO: 2571 - RNA, 20 nt, Homo sapiens
ugggaauggggguaagggcc

SEQ ID NO: 2572 - RNA, 20 nt, Homo sapiens
ggcccuuacccccauuccca

SEQ ID NO: 2573 - RNA, 22 nt, Homo sapiens
aggcgauguggggauguagaga

SEQ ID NO: 2574 - RNA, 22 nt, Homo sapiens
ucucuacauccccacaucgccu

SEQ ID NO: 2575 - RNA, 21 nt, Homo sapiens
uaguggucagagggcuuauga

SEQ ID NO: 2576 - RNA, 21 nt, Homo sapiens
ucauaagcccucugaccacua

SEQ ID NO: 2577 - RNA, 22 nt, Homo sapiens
ucugacaucagugauucuccug

SEQ ID NO: 2578 - RNA, 22 nt, Homo sapiens
caggagaaucacugaugucaga

SEQ ID NO: 2579 - RNA, 22 nt, Homo sapiens
cgcgccugcaggaacugguaga

SEQ ID NO: 2580 - RNA, 22 nt, Homo sapiens
ucuaccaguuccugcaggcgcg

SEQ ID NO: 2581 - RNA, 23 nt, Homo sapiens
ugggcaggggcuuauuguaggag

SEQ ID NO: 2582 - RNA, 23 nt, Homo sapiens
cuccuacaauaagccccugccca

SEQ ID NO: 2583 - RNA, 22 nt, Homo sapiens
ugcaggggucgggugggccagg

SEQ ID NO: 2584 - RNA, 22 nt, Homo sapiens
ccuggcccacccgaccccugca

SEQ ID NO: 2585 - RNA, 20 nt, Homo sapiens
aggcgcacccgaccacaugc

SEQ ID NO: 2586 - RNA, 20 nt, Homo sapiens
gcauguggucgggugcgccu

SEQ ID NO: 2587 - RNA, 22 nt, Homo sapiens
auaguccgaguaacgucggggc

SEQ ID NO: 2588 - RNA, 22 nt, Homo sapiens
gccccgacguuacucggacuau

SEQ ID NO: 2589 - RNA, 23 nt, Homo sapiens
cugggcccgcggcgggcgugggg

SEQ ID NO: 2590 - RNA, 23 nt, Homo sapiens
ccccacgcccgccgcgggcccag

SEQ ID NO: 2591 - RNA, 21 nt, Homo sapiens
uacuuggaaaggcaucaguug

SEQ ID NO: 2592 - RNA, 21 nt, Homo sapiens
caacugaugccuuuccaagua

SEQ ID NO: 2593 - RNA, 22 nt, Homo sapiens
ugcaacgaaccugagccacuga

SEQ ID NO: 2594 - RNA, 22 nt, Homo sapiens
ucaguggcucagguucguugca

SEQ ID NO: 2595 - RNA, 22 nt, Homo sapiens
ugcaacuuaccugagucauuga

SEQ ID NO: 2596 - RNA, 22 nt, Homo sapiens
ucaaugacucagguaaguugca

SEQ ID NO: 2597 - RNA, 21 nt, Homo sapiens
cacuguguccuuucugcguag

SEQ ID NO: 2598 - RNA, 21 nt, Homo sapiens
cuacgcagaaaggacacagug

SEQ ID NO: 2599 - RNA, 22 nt, Homo sapiens
cacuggcuccuuucuggguaga

SEQ ID NO: 2600 - RNA, 22 nt, Homo sapiens
ucuacccagaaaggagccagug

SEQ ID NO: 2601 - RNA, 22 nt, Homo sapiens
cacuguuuccuuucugagugga

SEQ ID NO: 2602 - RNA, 22 nt, Homo sapiens
uccacucagaaaggaaacagug

SEQ ID NO: 2603 - RNA, 21 nt, Homo sapiens
uauucagaaaggugccaguca

SEQ ID NO: 2604 - RNA, 21 nt, Homo sapiens
ugacuggcaccuuucugaaua

SEQ ID NO: 2605 - RNA, 20 nt, Homo sapiens
auuccuagaaauuguucaua

SEQ ID NO: 2606 - RNA, 20 nt, Homo sapiens
uaugaacaauuucuaggaau

SEQ ID NO: 2607 - RNA, 22 nt, Homo sapiens
uaauacugucugguaaaaccgu

SEQ ID NO: 2608 - RNA, 22 nt, Homo sapiens
acgguuuuaccagacaguauua

SEQ ID NO: 2609 - RNA, 22 nt, Homo sapiens
ugaaacauacacgggaaaccuc

SEQ ID NO: 2610 - RNA, 22 nt, Homo sapiens
gagguuucccguguauguuuca

SEQ ID NO: 2611 - RNA, 22 nt, Homo sapiens
cuauacaaccuacugccuuccc

SEQ ID NO: 2612 - RNA, 22 nt, Homo sapiens
gggaaggcaguagguuguauag

SEQ ID NO: 2613 - RNA, 22 nt, Homo sapiens
ugagguaguagguugugugguu

SEQ ID NO: 2614 - RNA, 22 nt, Homo sapiens
aaccacacaaccuacuaccuca

SEQ ID NO: 2615 - RNA, 22 nt, Homo sapiens
uaacacugucugguaacgaugu

SEQ ID NO: 2616 - RNA, 22 nt, Homo sapiens
acaucguuaccagacaguguua

SEQ ID NO: 2617 - RNA, 22 nt, Homo sapiens
caucuuaccggacagugcugga

SEQ ID NO: 2618 - RNA, 22 nt, Homo sapiens
uccagcacuguccgguaagaug

SEQ ID NO: 2619 - RNA, 22 nt, Homo sapiens
uaauacugccugguaaugauga

SEQ ID NO: 2620 - RNA, 22 nt, Homo sapiens
ucaucauuaccaggcaguauua

SEQ ID NO: 2621 - RNA, 22 nt, Homo sapiens
caucuuacugggcagcauugga

SEQ ID NO: 2622 - RNA, 22 nt, Homo sapiens
uccaaugcugcccaguaagaug

SEQ ID NO: 2623 - RNA, 23 nt, Homo sapiens
uaauacugccggguaaugaugga

SEQ ID NO: 2624 - RNA, 23 nt, Homo sapiens
uccaucauuacccggcaguauua

SEQ ID NO: 2625 - RNA, 22 nt, Homo sapiens
cgucuuacccagcaguguuugg

SEQ ID NO: 2626 - RNA, 22 nt, Homo sapiens
ccaaacacugcuggguaagacg

SEQ ID NO: 2627 - RNA, 22 nt, Homo sapiens
uccagcaucagugauuuuguug

SEQ ID NO: 2628 - RNA, 22 nt, Homo sapiens
caacaaaaucacugaugcugga

SEQ ID NO: 2629 - RNA, 20 nt, Homo sapiens
uacaguauagaugauguacu

SEQ ID NO: 2630 - RNA, 20 nt, Homo sapiens
aguacaucaucuauacugua

SEQ ID NO: 2631 - RNA, 22 nt, Homo sapiens
ggauaucaucauauacuguaag

SEQ ID NO: 2632 - RNA, 22 nt, Homo sapiens
cuuacaguauaugaugauaucc

SEQ ID NO: 2633 - RNA, 21 nt, Homo sapiens
cggggcagcucaguacaggau

SEQ ID NO: 2634 - RNA, 21 nt, Homo sapiens
auccuguacugagcugccccg

SEQ ID NO: 2635 - RNA, 21 nt, Homo sapiens
uccuucugcuccgucccccag

SEQ ID NO: 2636 - RNA, 21 nt, Homo sapiens
cugggggacggagcagaagga

SEQ ID NO: 2637 - RNA, 21 nt, Homo sapiens
cgggggcggggccgaagcgcg

SEQ ID NO: 2638 - RNA, 21 nt, Homo sapiens
cgcgcuucggccccgcccccg

SEQ ID NO: 2639 - RNA, 21 nt, Homo sapiens
uccugcgcgucccagaugccc

SEQ ID NO: 2640 - RNA, 21 nt, Homo sapiens
gggcaucugggacgcgcagga

SEQ ID NO: 2641 - RNA, 22 nt, Homo sapiens
caucagaauucauggaggcuag

SEQ ID NO: 2642 - RNA, 22 nt, Homo sapiens
cuagccuccaugaauucugaug

SEQ ID NO: 2643 - RNA, 22 nt, Homo sapiens
agcuuccaugacuccugaugga

SEQ ID NO: 2644 - RNA, 22 nt, Homo sapiens
uccaucaggagucauggaagcu

SEQ ID NO: 2645 - RNA, 21 nt, Homo sapiens
ugacagcgcccugccuggcuc

SEQ ID NO: 2646 - RNA, 21 nt, Homo sapiens
gagccaggcagggcgcuguca

SEQ ID NO: 2647 - RNA, 24 nt, Homo sapiens
agcgcgggcugagcgcugccaguc

SEQ ID NO: 2648 - RNA, 24 nt, Homo sapiens
gacuggcagcgcucagcccgcgcu

SEQ ID NO: 2649 - RNA, 22 nt, Homo sapiens
cugggaggugugauaucguggu

SEQ ID NO: 2650 - RNA, 22 nt, Homo sapiens
accacgauaucacaccucccag

SEQ ID NO: 2651 - RNA, 22 nt, Homo sapiens
ugugauaucaugguuccuggga

SEQ ID NO: 2652 - RNA, 22 nt, Homo sapiens
ucccaggaaccaugauaucaca

SEQ ID NO: 2653 - RNA, 22 nt, Homo sapiens
aggugcuccaggcuggcucaca

SEQ ID NO: 2654 - RNA, 22 nt, Homo sapiens
ugugagccagccuggagcaccu

SEQ ID NO: 2655 - RNA, 22 nt, Homo sapiens
gagcaauguagguagacuguuu

SEQ ID NO: 2656 - RNA, 22 nt, Homo sapiens
aaacagucuaccuacauugcuc

SEQ ID NO: 2657 - RNA, 22 nt, Homo sapiens
uguccucuagggccugcagucu

SEQ ID NO: 2658 - RNA, 22 nt, Homo sapiens
agacugcaggcccuagaggaca

SEQ ID NO: 2659 - RNA, 20 nt, Homo sapiens
aaaggcauaaaaccaagaca

SEQ ID NO: 2660 - RNA, 20 nt, Homo sapiens
ugucuugguuuuaugccuuu

SEQ ID NO: 2661 - RNA, 21 nt, Homo sapiens
uaacgcauaauauggacaugu

SEQ ID NO: 2662 - RNA, 21 nt, Homo sapiens
acauguccauauuaugcguua

SEQ ID NO: 2663 - RNA, 22 nt, Homo sapiens
uugaggaaaagauggucuuauu

SEQ ID NO: 2664 - RNA, 22 nt, Homo sapiens
aauaagaccaucuuuuccucaa

SEQ ID NO: 2665 - RNA, 26 nt, Homo sapiens
aagaggaagaaauggcugguucucag

SEQ ID NO: 2666 - RNA, 26 nt, Homo sapiens
cugagaaccagccauuucuuccucuu

SEQ ID NO: 2667 - RNA, 20 nt, Homo sapiens
gcucggacugagcagguggg

SEQ ID NO: 2668 - RNA, 20 nt, Homo sapiens
cccaccugcucaguccgagc

SEQ ID NO: 2669 - RNA, 21 nt, Homo sapiens
acagggccgcagauggagacu

SEQ ID NO: 2670 - RNA, 21 nt, Homo sapiens
agucuccaucugcggcccugu

SEQ ID NO: 2671 - RNA, 21 nt, Homo sapiens
gcagagaacaaaggacucagu

SEQ ID NO: 2672 - RNA, 21 nt, Homo sapiens
acugaguccuuuguucucugc

SEQ ID NO: 2673 - RNA, 22 nt, Homo sapiens
acugauuaucuuaacucucuga

SEQ ID NO: 2674 - RNA, 22 nt, Homo sapiens
ucagagaguuaagauaaucagu

SEQ ID NO: 2675 - RNA, 23 nt, Homo sapiens
ucucugaguaccauaugccuugu

SEQ ID NO: 2676 - RNA, 23 nt, Homo sapiens
acaaggcauaugguacucagaga

SEQ ID NO: 2677 - RNA, 22 nt, Homo sapiens
aacuaguaauguuggauuaggg

SEQ ID NO: 2678 - RNA, 22 nt, Homo sapiens
cccuaauccaacauuacuaguu

SEQ ID NO: 2679 - RNA, 22 nt, Homo sapiens
auauguauaugugacugcuacu

SEQ ID NO: 2680 - RNA, 22 nt, Homo sapiens
aguagcagucacauauacauau

SEQ ID NO: 2681 - RNA, 21 nt, Homo sapiens
uggccaaaaagcaggcagaga

SEQ ID NO: 2682 - RNA, 21 nt, Homo sapiens
ucucugccugcuuuuuggcca

SEQ ID NO: 2683 - RNA, 22 nt, Homo sapiens
ggaggaaccuuggagcuucggc

SEQ ID NO: 2684 - RNA, 22 nt, Homo sapiens
gccgaagcuccaagguuccucc

SEQ ID NO: 2685 - RNA, 23 nt, Homo sapiens
gaggcugaugugaguagaccacu

SEQ ID NO: 2686 - RNA, 23 nt, Homo sapiens
aguggucuacucacaucagccuc

SEQ ID NO: 2687 - RNA, 21 nt, Homo sapiens
cuguccuaagguuguugaguu

SEQ ID NO: 2688 - RNA, 21 nt, Homo sapiens
aacucaacaaccuuaggacag

SEQ ID NO: 2689 - RNA, 21 nt, Homo sapiens
ucuucaaccucaggacuugca

SEQ ID NO: 2690 - RNA, 21 nt, Homo sapiens
ugcaaguccugagguugaaga

SEQ ID NO: 2691 - RNA, 22 nt, Homo sapiens
ugugauaucaugguuccuggga

SEQ ID NO: 2692 - RNA, 22 nt, Homo sapiens
ucccaggaaccaugauaucaca

SEQ ID NO: 2693 - RNA, 22 nt, Homo sapiens
cugggaggugugauauuguggu

SEQ ID NO: 2694 - RNA, 22 nt, Homo sapiens
accacaauaucacaccucccag

SEQ ID NO: 2695 - RNA, 22 nt, Homo sapiens
cagguagauauuugauaggcau

SEQ ID NO: 2696 - RNA, 22 nt, Homo sapiens
augccuaucaaauaucuaccug

SEQ ID NO: 2697 - RNA, 21 nt, Homo sapiens
gccuaucacauaucugccugu

SEQ ID NO: 2698 - RNA, 21 nt, Homo sapiens
acaggcagauaugugauaggc

SEQ ID NO: 2699 - RNA, 20 nt, Homo sapiens
gggcuggggcgcggggaggu

SEQ ID NO: 2700 - RNA, 20 nt, Homo sapiens
accuccccgcgccccagccc

SEQ ID NO: 2701 - RNA, 18 nt, Homo sapiens
ugcuuccuuucagagggu

SEQ ID NO: 2702 - RNA, 18 nt, Homo sapiens
acccucugaaaggaagca

SEQ ID NO: 2703 - RNA, 21 nt, Homo sapiens
ugaguuggccaucugagugag

SEQ ID NO: 2704 - RNA, 21 nt, Homo sapiens
cucacucagauggccaacuca

SEQ ID NO: 2705 - RNA, 23 nt, Homo sapiens
aacauucauuguugucggugggu

SEQ ID NO: 2706 - RNA, 23 nt, Homo sapiens
acccaccgacaacaaugaauguu

SEQ ID NO: 2707 - RNA, 21 nt, Homo sapiens
ucacagugaaccggucucuuu

SEQ ID NO: 2708 - RNA, 21 nt, Homo sapiens
aaagagaccgguucacuguga

SEQ ID NO: 2709 - RNA, 22 nt, Homo sapiens
caacaaaucacagucugccaua

SEQ ID NO: 2710 - RNA, 22 nt, Homo sapiens
uauggcagacugugauuuguug

SEQ ID NO: 2711 - RNA, 21 nt, Homo sapiens
cucacugaacaaugaaugcaa

SEQ ID NO: 2712 - RNA, 21 nt, Homo sapiens
uugcauucauuguucagugag

SEQ ID NO: 2713 - RNA, 23 nt, Homo sapiens
aacauucauugcugucggugggu

SEQ ID NO: 2714 - RNA, 23 nt, Homo sapiens
acccaccgacagcaaugaauguu

SEQ ID NO: 2715 - RNA, 22 nt, Homo sapiens
accaucgaccguugauuguacc

SEQ ID NO: 2716 - RNA, 22 nt, Homo sapiens
gguacaaucaacggucgauggu

SEQ ID NO: 2717 - RNA, 23 nt, Homo sapiens
aacauucaacgcugucggugagu

SEQ ID NO: 2718 - RNA, 23 nt, Homo sapiens
acucaccgacagcguugaauguu

SEQ ID NO: 2719 - RNA, 22 nt, Homo sapiens
accacugaccguugacuguacc

SEQ ID NO: 2720 - RNA, 22 nt, Homo sapiens
gguacagucaacggucaguggu

SEQ ID NO: 2721 - RNA, 22 nt, Homo sapiens
cuguugccacuaaccucaaccu

SEQ ID NO: 2722 - RNA, 22 nt, Homo sapiens
agguugagguuaguggcaacag

SEQ ID NO: 2723 - RNA, 22 nt, Homo sapiens
auaagacgagcaaaaagcuugu

SEQ ID NO: 2724 - RNA, 22 nt, Homo sapiens
acaagcuuuuugcucgucuuau

SEQ ID NO: 2725 - RNA, 22 nt, Homo sapiens
auaagacgaacaaaagguuugu

SEQ ID NO: 2726 - RNA, 22 nt, Homo sapiens
acaaaccuuuuguucgucuuau

SEQ ID NO: 2727 - RNA, 21 nt, Homo sapiens
agggagggacgggggcugugc

SEQ ID NO: 2728 - RNA, 21 nt, Homo sapiens
gcacagcccccgucccucccu

SEQ ID NO: 2729 - RNA, 23 nt, Homo sapiens
ucuggcuccgugucuucacuccc

SEQ ID NO: 2730 - RNA, 23 nt, Homo sapiens
gggagugaagacacggagccaga

SEQ ID NO: 2731 - RNA, 22 nt, Homo sapiens
uggaauguaaagaaguauguau

SEQ ID NO: 2732 - RNA, 22 nt, Homo sapiens
auacauacuucuuuacauucca

SEQ ID NO: 2733 - RNA, 22 nt, Homo sapiens
aacaucacagcaagucugugcu

SEQ ID NO: 2734 - RNA, 22 nt, Homo sapiens
agcacagacuugcugugauguu

SEQ ID NO: 2735 - RNA, 21 nt, Homo sapiens
uuaagacuugcagugauguuu

SEQ ID NO: 2736 - RNA, 21 nt, Homo sapiens
aaacaucacugcaagucuuaa

SEQ ID NO: 2737 - RNA, 22 nt, Homo sapiens
aacaucacugcaagucuuaaca

SEQ ID NO: 2738 - RNA, 22 nt, Homo sapiens
uguuaagacuugcagugauguu

SEQ ID NO: 2739 - RNA, 21 nt, Homo sapiens
acagacuugcugugauguuca

SEQ ID NO: 2740 - RNA, 21 nt, Homo sapiens
ugaacaucacagcaagucugu

SEQ ID NO: 2741 - RNA, 22 nt, Homo sapiens
aaaccguuaccauuacugaguu

SEQ ID NO: 2742 - RNA, 22 nt, Homo sapiens
aacucaguaaugguaacgguuu

SEQ ID NO: 2743 - RNA, 22 nt, Homo sapiens
uagcaagagaaccauuaccauu

SEQ ID NO: 2744 - RNA, 22 nt, Homo sapiens
aaugguaaugguucucuugcua

SEQ ID NO: 2745 - RNA, 23 nt, Homo sapiens
ugaggggcagagagcgagacuuu

SEQ ID NO: 2746 - RNA, 23 nt, Homo sapiens
aaagucucgcucucugccccuca

SEQ ID NO: 2747 - RNA, 22 nt, Homo sapiens
caagcucgcuucuaugggucug

SEQ ID NO: 2748 - RNA, 22 nt, Homo sapiens
cagacccauagaagcgagcuug

SEQ ID NO: 2749 - RNA, 22 nt, Homo sapiens
aacccguagauccgaucuugug

SEQ ID NO: 2750 - RNA, 22 nt, Homo sapiens
cacaagaucggaucuacggguu

SEQ ID NO: 2751 - RNA, 22 nt, Homo sapiens
caagcucgugucuguggguccg

SEQ ID NO: 2752 - RNA, 22 nt, Homo sapiens
cggacccacagacacgagcuug

SEQ ID NO: 2753 - RNA, 22 nt, Homo sapiens
cacccguagaaccgaccuugcg

SEQ ID NO: 2754 - RNA, 22 nt, Homo sapiens
cgcaaggucgguucuacgggug

SEQ ID NO: 2755 - RNA, 23 nt, Homo sapiens
uggagacgcggcccuguuggagu

SEQ ID NO: 2756 - RNA, 23 nt, Homo sapiens
acuccaacagggccgcgucucca

SEQ ID NO: 2757 - RNA, 23 nt, Homo sapiens
ucuacagugcacgugucuccagu

SEQ ID NO: 2758 - RNA, 23 nt, Homo sapiens
acuggagacacgugcacuguaga

SEQ ID NO: 2759 - RNA, 22 nt, Homo sapiens
caaauucguaucuaggggaaua

SEQ ID NO: 2760 - RNA, 22 nt, Homo sapiens
uauuccccuagauacgaauuug

SEQ ID NO: 2761 - RNA, 23 nt, Homo sapiens
uacccuguagauccgaauuugug

SEQ ID NO: 2762 - RNA, 23 nt, Homo sapiens
cacaaauucggaucuacagggua

SEQ ID NO: 2763 - RNA, 23 nt, Homo sapiens
ccugcagcgacuugauggcuucc

SEQ ID NO: 2764 - RNA, 23 nt, Homo sapiens
ggaagccaucaagucgcugcagg

SEQ ID NO: 2765 - RNA, 22 nt, Homo sapiens
ucagugcacuacagaacuuugu

SEQ ID NO: 2766 - RNA, 22 nt, Homo sapiens
acaaaguucuguagugcacuga

SEQ ID NO: 2767 - RNA, 22 nt, Homo sapiens
aaaguucugagacacuccgacu

SEQ ID NO: 2768 - RNA, 22 nt, Homo sapiens
agucggagugucucagaacuuu

SEQ ID NO: 2769 - RNA, 22 nt, Homo sapiens
ccuguucuccauuacuuggcuc

SEQ ID NO: 2770 - RNA, 22 nt, Homo sapiens
gagccaaguaauggagaacagg

SEQ ID NO: 2771 - RNA, 21 nt, Homo sapiens
uucaaguaauucaggauaggu

SEQ ID NO: 2772 - RNA, 21 nt, Homo sapiens
accuauccugaauuacuugaa

SEQ ID NO: 2773 - RNA, 22 nt, Homo sapiens
gcccugaacgaggggucuggag

SEQ ID NO: 2774 - RNA, 22 nt, Homo sapiens
cuccagaccccucguucagggc

SEQ ID NO: 2775 - RNA, 22 nt, Homo sapiens
gcugacuccuaguccagggcuc

SEQ ID NO: 2776 - RNA, 22 nt, Homo sapiens
gagcccuggacuaggagucagc

SEQ ID NO: 2777 - RNA, 22 nt, Homo sapiens
aucacacaaaggcaacuuuugu

SEQ ID NO: 2778 - RNA, 22 nt, Homo sapiens
acaaaaguugccuuugugugau

SEQ ID NO: 2779 - RNA, 22 nt, Homo sapiens
agagguugcccuuggugaauuc

SEQ ID NO: 2780 - RNA, 22 nt, Homo sapiens
gaauucaccaagggcaaccucu

SEQ ID NO: 2781 - RNA, 21 nt, Homo sapiens
gguagauuuuccuucuauggu

SEQ ID NO: 2782 - RNA, 21 nt, Homo sapiens
accauagaaggaaaaucuacc

SEQ ID NO: 2783 - RNA, 21 nt, Homo sapiens
aucauagaggaaaauccacgu

SEQ ID NO: 2784 - RNA, 21 nt, Homo sapiens
acguggauuuuccucuaugau

SEQ ID NO: 2785 - RNA, 22 nt, Homo sapiens
guagauucuccuucuaugagua

SEQ ID NO: 2786 - RNA, 22 nt, Homo sapiens
uacucauagaaggagaaucuac

SEQ ID NO: 2787 - RNA, 22 nt, Homo sapiens
cugguacaggccugggggacag

SEQ ID NO: 2788 - RNA, 22 nt, Homo sapiens
cugucccccaggccuguaccag

SEQ ID NO: 2789 - RNA, 22 nt, Homo sapiens
ucucccaacccuuguaccagug

SEQ ID NO: 2790 - RNA, 22 nt, Homo sapiens
cacugguacaaggguugggaga

SEQ ID NO: 2791 - RNA, 22 nt, Homo sapiens
acggguuaggcucuugggagcu

SEQ ID NO: 2792 - RNA, 22 nt, Homo sapiens
agcucccaagagccuaacccgu

SEQ ID NO: 2793 - RNA, 22 nt, Homo sapiens
ucacaagucaggcucuugggac

SEQ ID NO: 2794 - RNA, 22 nt, Homo sapiens
gucccaagagccugacuuguga

SEQ ID NO: 2795 - RNA, 22 nt, Homo sapiens
aacccguagauccgaacuugug

SEQ ID NO: 2796 - RNA, 22 nt, Homo sapiens
cacaaguucggaucuacggguu

SEQ ID NO: 2797 - RNA, 21 nt, Homo sapiens
cuguacaggccacugccuugc

SEQ ID NO: 2798 - RNA, 21 nt, Homo sapiens
gcaaggcaguggccuguacag

SEQ ID NO: 2799 - RNA, 22 nt, Homo sapiens
ugagguaguaguuuguacaguu

SEQ ID NO: 2800 - RNA, 22 nt, Homo sapiens
aacuguacaaacuacuaccuca

SEQ ID NO: 2801 - RNA, 22 nt, Homo sapiens
ucccugagacccuaacuuguga

SEQ ID NO: 2802 - RNA, 22 nt, Homo sapiens
ucacaaguuagggucucaggga

SEQ ID NO: 2803 - RNA, 22 nt, Homo sapiens
caagcuuguaucuauagguaug

SEQ ID NO: 2804 - RNA, 22 nt, Homo sapiens
cauaccuauagauacaagcuug

SEQ ID NO: 2805 - RNA, 23 nt, Homo sapiens
aaagugcugcgacauuugagcgu

SEQ ID NO: 2806 - RNA, 23 nt, Homo sapiens
acgcucaaaugucgcagcacuuu

SEQ ID NO: 2807 - RNA, 22 nt, Homo sapiens
uuuagagacggggucuugcucu

SEQ ID NO: 2808 - RNA, 22 nt, Homo sapiens
agagcaagaccccgucucuaaa

SEQ ID NO: 2809 - RNA, 24 nt, Homo sapiens
uggcccugacugaagaccagcagu

SEQ ID NO: 2810 - RNA, 24 nt, Homo sapiens
acugcuggucuucagucagggcca

SEQ ID NO: 2811 - RNA, 21 nt, Homo sapiens
gcgacccauacuugguuucag

SEQ ID NO: 2812 - RNA, 21 nt, Homo sapiens
cugaaaccaaguaugggucgc

SEQ ID NO: 2813 - RNA, 22 nt, Homo sapiens
gaaaucaagcgugggugagacc

SEQ ID NO: 2814 - RNA, 22 nt, Homo sapiens
ggucucacccacgcuugauuuc

SEQ ID NO: 2815 - RNA, 21 nt, Homo sapiens
cccugggccucugcuccccag

SEQ ID NO: 2816 - RNA, 21 nt, Homo sapiens
cuggggagcagaggcccaggg

SEQ ID NO: 2817 - RNA, 24 nt, Homo sapiens
uggggagcugaggcucugggggug

SEQ ID NO: 2818 - RNA, 24 nt, Homo sapiens
cacccccagagccucagcucccca

SEQ ID NO: 2819 - RNA, 20 nt, Homo sapiens
ggggagcuguggaagcagua

SEQ ID NO: 2820 - RNA, 20 nt, Homo sapiens
uacugcuuccacagcucccc

SEQ ID NO: 2821 - RNA, 25 nt, Homo sapiens
cuagugagggacagaaccaggauuc

SEQ ID NO: 2822 - RNA, 25 nt, Homo sapiens
gaauccugguucugucccucacuag

SEQ ID NO: 2823 - RNA, 20 nt, Homo sapiens
agagucuugugaugucuugc

SEQ ID NO: 2824 - RNA, 20 nt, Homo sapiens
gcaagacaucacaagacucu

SEQ ID NO: 2825 - RNA, 23 nt, Homo sapiens
gcagcagagaauaggacuacguc

SEQ ID NO: 2826 - RNA, 23 nt, Homo sapiens
gacguaguccuauucucugcugc

SEQ ID NO: 2827 - RNA, 23 nt, Homo sapiens
ugagcgccucgacgacagagccg

SEQ ID NO: 2828 - RNA, 23 nt, Homo sapiens
cggcucugucgucgaggcgcuca

SEQ ID NO: 2829 - RNA, 23 nt, Homo sapiens
ucccuguccuccaggagcucacg

SEQ ID NO: 2830 - RNA, 23 nt, Homo sapiens
cgugagcuccuggaggacaggga

SEQ ID NO: 2831 - RNA, 22 nt, Homo sapiens
cuauacggccuccuagcuuucc

SEQ ID NO: 2832 - RNA, 22 nt, Homo sapiens
ggaaagcuaggaggccguauag

SEQ ID NO: 2833 - RNA, 22 nt, Homo sapiens
ugagguaggagguuguauaguu

SEQ ID NO: 2834 - RNA, 22 nt, Homo sapiens
aacuauacaaccuccuaccuca

SEQ ID NO: 2835 - RNA, 22 nt, Homo sapiens
cugcgcaagcuacugccuugcu

SEQ ID NO: 2836 - RNA, 22 nt, Homo sapiens
agcaaggcaguagcuugcgcag

SEQ ID NO: 2837 - RNA, 22 nt, Homo sapiens
ugagguaguaguuugugcuguu

SEQ ID NO: 2838 - RNA, 22 nt, Homo sapiens
aacagcacaaacuacuaccuca

SEQ ID NO: 2839 - RNA, 22 nt, Homo sapiens
ugcccuguggacucaguucugg

SEQ ID NO: 2840 - RNA, 22 nt, Homo sapiens
ccagaacugaguccacagggca

SEQ ID NO: 2841 - RNA, 21 nt, Homo sapiens
ugguucuagacuugccaacua

SEQ ID NO: 2842 - RNA, 21 nt, Homo sapiens
uaguuggcaagucuagaacca

SEQ ID NO: 2843 - RNA, 23 nt, Homo sapiens
ugucugcccgcaugccugccucu

SEQ ID NO: 2844 - RNA, 23 nt, Homo sapiens
agaggcaggcaugcgggcagaca

SEQ ID NO: 2845 - RNA, 22 nt, Homo sapiens
aaaaguaauugcggucuuuggu

SEQ ID NO: 2846 - RNA, 22 nt, Homo sapiens
accaaagaccgcaauuacuuuu

SEQ ID NO: 2847 - RNA, 18 nt, Homo sapiens
ucgaggagcucacagucu

SEQ ID NO: 2848 - RNA, 18 nt, Homo sapiens
agacugugagcuccucga

SEQ ID NO: 2849 - RNA, 22 nt, Homo sapiens
cuauacaaucuauugccuuccc

SEQ ID NO: 2850 - RNA, 22 nt, Homo sapiens
gggaaggcaauagauuguauag

SEQ ID NO: 2851 - RNA, 22 nt, Homo sapiens
cuauacagucuacugucuuucc

SEQ ID NO: 2852 - RNA, 22 nt, Homo sapiens
ggaaagacaguagacuguauag

SEQ ID NO: 2853 - RNA, 22 nt, Homo sapiens
ugagguaguagauuguauaguu

SEQ ID NO: 2854 - RNA, 22 nt, Homo sapiens
aacuauacaaucuacuaccuca

SEQ ID NO: 2855 - RNA, 22 nt, Homo sapiens
aaaaguaauugugguuuuggcc

SEQ ID NO: 2856 - RNA, 22 nt, Homo sapiens
ggccaaaaccacaauuacuuuu

SEQ ID NO: 2857 - RNA, 22 nt, Homo sapiens
aaaaguaauugcgguuuuugcc

SEQ ID NO: 2858 - RNA, 22 nt, Homo sapiens
ggcaaaaaccgcaauuacuuuu

SEQ ID NO: 2859 - RNA, 22 nt, Homo sapiens
ccucugaaauucaguucuucag

SEQ ID NO: 2860 - RNA, 22 nt, Homo sapiens
cugaagaacugaauuucagagg

SEQ ID NO: 2861 - RNA, 22 nt, Homo sapiens
ugagaacugaauuccauggguu

SEQ ID NO: 2862 - RNA, 22 nt, Homo sapiens
aacccauggaauucaguucuca

SEQ ID NO: 2863 - RNA, 22 nt, Homo sapiens
acagcaggcacagacaggcagu

SEQ ID NO: 2864 - RNA, 22 nt, Homo sapiens
acugccugucugugccugcugu

SEQ ID NO: 2865 - RNA, 22 nt, Homo sapiens
ugccugucuacacuugcugugc

SEQ ID NO: 2866 - RNA, 22 nt, Homo sapiens
gcacagcaaguguagacaggca

SEQ ID NO: 2867 - RNA, 22 nt, Homo sapiens
uagcaccaucugaaaucgguua

SEQ ID NO: 2868 - RNA, 22 nt, Homo sapiens
uaaccgauuucagauggugcua

SEQ ID NO: 2869 - RNA, 22 nt, Homo sapiens
acugauuucuuuugguguucag

SEQ ID NO: 2870 - RNA, 22 nt, Homo sapiens
cugaacaccaaaagaaaucagu

SEQ ID NO: 2871 - RNA, 24 nt, Homo sapiens
gcugguuucauauggugguuuaga

SEQ ID NO: 2872 - RNA, 24 nt, Homo sapiens
ucuaaaccaccauaugaaaccagc

SEQ ID NO: 2873 - RNA, 22 nt, Homo sapiens
cugguuucacaugguggcuuag

SEQ ID NO: 2874 - RNA, 22 nt, Homo sapiens
cuaagccaccaugugaaaccag

SEQ ID NO: 2875 - RNA, 23 nt, Homo sapiens
uagcaccauuugaaaucaguguu

SEQ ID NO: 2876 - RNA, 23 nt, Homo sapiens
aacacugauuucaaauggugcua

SEQ ID NO: 2877 - RNA, 22 nt, Homo sapiens
uagcaccauuugaaaucgguua

SEQ ID NO: 2878 - RNA, 22 nt, Homo sapiens
uaaccgauuucaaauggugcua

SEQ ID NO: 2879 - RNA, 22 nt, Homo sapiens
ugaccgauuucuccugguguuc

SEQ ID NO: 2880 - RNA, 22 nt, Homo sapiens
gaacaccaggagaaaucgguca

SEQ ID NO: 2881 - RNA, 23 nt, Homo sapiens
ugucacucggcucggcccacuac

SEQ ID NO: 2882 - RNA, 23 nt, Homo sapiens
guagugggccgagccgagugaca

SEQ ID NO: 2883 - RNA, 22 nt, Homo sapiens
cugccaauuccauaggucacag

SEQ ID NO: 2884 - RNA, 22 nt, Homo sapiens
cugugaccuauggaauuggcag

SEQ ID NO: 2885 - RNA, 21 nt, Homo sapiens
cugaccuaugaauugacagcc

SEQ ID NO: 2886 - RNA, 21 nt, Homo sapiens
ggcugucaauucauaggucag

SEQ ID NO: 2887 - RNA, 20 nt, Homo sapiens
acugccccaggugcugcugg

SEQ ID NO: 2888 - RNA, 20 nt, Homo sapiens
ccagcagcaccuggggcagu

SEQ ID NO: 2889 - RNA, 22 nt, Homo sapiens
aacgccauuaucacacuaaaua

SEQ ID NO: 2890 - RNA, 22 nt, Homo sapiens
uauuuagugugauaauggcguu

SEQ ID NO: 2891 - RNA, 22 nt, Homo sapiens
cuuucagucggauguuugcagc

SEQ ID NO: 2892 - RNA, 22 nt, Homo sapiens
gcugcaaacauccgacugaaag

SEQ ID NO: 2893 - RNA, 22 nt, Homo sapiens
aauugcacgguauccaucugua

SEQ ID NO: 2894 - RNA, 22 nt, Homo sapiens
uacagauggauaccgugcaauu

SEQ ID NO: 2895 - RNA, 22 nt, Homo sapiens
cggguggaucacgaugcaauuu

SEQ ID NO: 2896 - RNA, 22 nt, Homo sapiens
aaauugcaucgugauccacccg

SEQ ID NO: 2897 - RNA, 22 nt, Homo sapiens
cugggagguggauguuuacuuc

SEQ ID NO: 2898 - RNA, 22 nt, Homo sapiens
gaaguaaacauccaccucccag

SEQ ID NO: 2899 - RNA, 22 nt, Homo sapiens
uguaaacauccuacacucagcu

SEQ ID NO: 2900 - RNA, 22 nt, Homo sapiens
agcugaguguaggauguuuaca

SEQ ID NO: 2901 - RNA, 22 nt, Homo sapiens
cugggagaggguuguuuacucc

SEQ ID NO: 2902 - RNA, 22 nt, Homo sapiens
ggaguaaacaacccucucccag

SEQ ID NO: 2903 - RNA, 22 nt, Homo sapiens
cugggagaaggcuguuuacucu

SEQ ID NO: 2904 - RNA, 22 nt, Homo sapiens
agaguaaacagccuucucccag

SEQ ID NO: 2905 - RNA, 23 nt, Homo sapiens
uguaaacauccuacacucucagc

SEQ ID NO: 2906 - RNA, 23 nt, Homo sapiens
gcugagaguguaggauguuuaca

SEQ ID NO: 2907 - RNA, 22 nt, Homo sapiens
uuuuucauuauugcuccugacc

SEQ ID NO: 2908 - RNA, 22 nt, Homo sapiens
ggucaggagcaauaaugaaaaa

SEQ ID NO: 2909 - RNA, 23 nt, Homo sapiens
ucaagagcaauaacgaaaaaugu

SEQ ID NO: 2910 - RNA, 23 nt, Homo sapiens
acauuuuucguuauugcucuuga

SEQ ID NO: 2911 - RNA, 23 nt, Homo sapiens
caaagugcuuacagugcagguag

SEQ ID NO: 2912 - RNA, 23 nt, Homo sapiens
cuaccugcacuguaagcacuuug

SEQ ID NO: 2913 - RNA, 22 nt, Homo sapiens
ggauuccuggaaauacuguucu

SEQ ID NO: 2914 - RNA, 22 nt, Homo sapiens
agaacaguauuuccaggaaucc

SEQ ID NO: 2915 - RNA, 23 nt, Homo sapiens
guccaguuuucccaggaaucccu

SEQ ID NO: 2916 - RNA, 23 nt, Homo sapiens
agggauuccugggaaaacuggac

SEQ ID NO: 2917 - RNA, 22 nt, Homo sapiens
acugcauuaugagcacuuaaag

SEQ ID NO: 2918 - RNA, 22 nt, Homo sapiens
cuuuaagugcucauaaugcagu

SEQ ID NO: 2919 - RNA, 23 nt, Homo sapiens
uaaagugcuuauagugcagguag

SEQ ID NO: 2920 - RNA, 23 nt, Homo sapiens
cuaccugcacuauaagcacuuua

SEQ ID NO: 2921 - RNA, 22 nt, Homo sapiens
gaggguuggguggaggcucucc

SEQ ID NO: 2922 - RNA, 22 nt, Homo sapiens
ggagagccuccacccaacccuc

SEQ ID NO: 2923 - RNA, 22 nt, Homo sapiens
cugugcgugugacagcggcuga

SEQ ID NO: 2924 - RNA, 22 nt, Homo sapiens
ucagccgcugucacacgcacag

SEQ ID NO: 2925 - RNA, 22 nt, Homo sapiens
ccaguggggcugcuguuaucug

SEQ ID NO: 2926 - RNA, 22 nt, Homo sapiens
cagauaacagcagccccacugg

SEQ ID NO: 2927 - RNA, 22 nt, Homo sapiens
uguaacagcaacuccaugugga

SEQ ID NO: 2928 - RNA, 22 nt, Homo sapiens
uccacauggaguugcuguuaca

SEQ ID NO: 2929 - RNA, 22 nt, Homo sapiens
ucacaguggucucugggauuau

SEQ ID NO: 2930 - RNA, 22 nt, Homo sapiens
auaaucccagagaccacuguga

SEQ ID NO: 2931 - RNA, 22 nt, Homo sapiens
uaaucucagcuggcaacuguga

SEQ ID NO: 2932 - RNA, 22 nt, Homo sapiens
ucacaguugccagcugagauua

SEQ ID NO: 2933 - RNA, 22 nt, Homo sapiens
cagugccucggcagugcagccc

SEQ ID NO: 2934 - RNA, 22 nt, Homo sapiens
gggcugcacugccgaggcacug

SEQ ID NO: 2935 - RNA, 20 nt, Homo sapiens
gugcauugcuguugcauugc

SEQ ID NO: 2936 - RNA, 20 nt, Homo sapiens
gcaaugcaacagcaaugcac

SEQ ID NO: 2937 - RNA, 19 nt, Homo sapiens
acuggacuuggaggcagaa

SEQ ID NO: 2938 - RNA, 19 nt, Homo sapiens
uucugccuccaaguccagu

SEQ ID NO: 2939 - RNA, 25 nt, Homo sapiens
acuggacuuggagucagaagagugg

SEQ ID NO: 2940 - RNA, 25 nt, Homo sapiens
ccacucuucugacuccaaguccagu

SEQ ID NO: 2941 - RNA, 20 nt, Homo sapiens
acuggacuuggagucagaaa

SEQ ID NO: 2942 - RNA, 20 nt, Homo sapiens
uuucugacuccaaguccagu

SEQ ID NO: 2943 - RNA, 19 nt, Homo sapiens
acuggacuuggagucagga

SEQ ID NO: 2944 - RNA, 19 nt, Homo sapiens
uccugacuccaaguccagu

SEQ ID NO: 2945 - RNA, 20 nt, Homo sapiens
acuggacuuggagccagaag

SEQ ID NO: 2946 - RNA, 20 nt, Homo sapiens
cuucuggcuccaaguccagu

SEQ ID NO: 2947 - RNA, 20 nt, Homo sapiens
acugggcuuggagucagaag

SEQ ID NO: 2948 - RNA, 20 nt, Homo sapiens
cuucugacuccaagcccagu

SEQ ID NO: 2949 - RNA, 21 nt, Homo sapiens
acuggacuuggugucagaugg

SEQ ID NO: 2950 - RNA, 21 nt, Homo sapiens
ccaucugacaccaaguccagu

SEQ ID NO: 2951 - RNA, 21 nt, Homo sapiens
acuggacuaggagucagaagg

SEQ ID NO: 2952 - RNA, 21 nt, Homo sapiens
ccuucugacuccuaguccagu

SEQ ID NO: 2953 - RNA, 19 nt, Homo sapiens
acuggauuuggagccagaa

SEQ ID NO: 2954 - RNA, 19 nt, Homo sapiens
uucuggcuccaaauccagu

SEQ ID NO: 2955 - RNA, 20 nt, Homo sapiens
aggaauguuccuucuuugcc

SEQ ID NO: 2956 - RNA, 20 nt, Homo sapiens
ggcaaagaaggaacauuccu

SEQ ID NO: 2957 - RNA, 21 nt, Homo sapiens
ucagugcaugacagaacuugg

SEQ ID NO: 2958 - RNA, 21 nt, Homo sapiens
ccaaguucugucaugcacuga

SEQ ID NO: 2959 - RNA, 20 nt, Homo sapiens
ucacaccugccucgcccccc

SEQ ID NO: 2960 - RNA, 20 nt, Homo sapiens
ggggggcgaggcagguguga

SEQ ID NO: 2961 - RNA, 21 nt, Homo sapiens
gugggcgggggcaggugugug

SEQ ID NO: 2962 - RNA, 21 nt, Homo sapiens
cacacaccugcccccgcccac

SEQ ID NO: 2963 - RNA, 22 nt, Homo sapiens
acgcccuucccccccuucuuca

SEQ ID NO: 2964 - RNA, 22 nt, Homo sapiens
ugaagaagggggggaagggcgu

SEQ ID NO: 2965 - RNA, 22 nt, Homo sapiens
uugcauauguaggaugucccau

SEQ ID NO: 2966 - RNA, 22 nt, Homo sapiens
augggacauccuacauaugcaa

SEQ ID NO: 2967 - RNA, 23 nt, Homo sapiens
guuugcacgggugggccuugucu

SEQ ID NO: 2968 - RNA, 23 nt, Homo sapiens
agacaaggcccacccgugcaaac

SEQ ID NO: 2969 - RNA, 22 nt, Homo sapiens
gacuauagaacuuucccccuca

SEQ ID NO: 2970 - RNA, 22 nt, Homo sapiens
ugagggggaaaguucuauaguc

SEQ ID NO: 2971 - RNA, 21 nt, Homo sapiens
agggggaaaguucuauagucc

SEQ ID NO: 2972 - RNA, 21 nt, Homo sapiens
ggacuauagaacuuucccccu

SEQ ID NO: 2973 - RNA, 21 nt, Homo sapiens
cuuuuugcggucugggcuugc

SEQ ID NO: 2974 - RNA, 21 nt, Homo sapiens
gcaagcccagaccgcaaaaag

SEQ ID NO: 2975 - RNA, 21 nt, Homo sapiens
ucuuguguucucuagaucagu

SEQ ID NO: 2976 - RNA, 21 nt, Homo sapiens
acugaucuagagaacacaaga

SEQ ID NO: 2977 - RNA, 23 nt, Homo sapiens
cccaguguucagacuaccuguuc

SEQ ID NO: 2978 - RNA, 23 nt, Homo sapiens
gaacagguagucugaacacuggg

SEQ ID NO: 2979 - RNA, 22 nt, Homo sapiens
acaguagucugcacauugguua

SEQ ID NO: 2980 - RNA, 22 nt, Homo sapiens
uaaccaaugugcagacuacugu

SEQ ID NO: 2981 - RNA, 22 nt, Homo sapiens
acaguagucugcacauugguua

SEQ ID NO: 2982 - RNA, 22 nt, Homo sapiens
uaaccaaugugcagacuacugu

SEQ ID NO: 2983 - RNA, 23 nt, Homo sapiens
cccaguguuuagacuaucuguuc

SEQ ID NO: 2984 - RNA, 23 nt, Homo sapiens
gaacagauagucuaaacacuggg

SEQ ID NO: 2985 - RNA, 22 nt, Homo sapiens
uggagugugacaaugguguuug

SEQ ID NO: 2986 - RNA, 22 nt, Homo sapiens
caaacaccauugucacacucca

SEQ ID NO: 2987 - RNA, 22 nt, Homo sapiens
ugcccuaaaugccccuucuggc

SEQ ID NO: 2988 - RNA, 22 nt, Homo sapiens
gccagaaggggcauuuagggca

SEQ ID NO: 2989 - RNA, 23 nt, Homo sapiens
uaaggugcaucuagugcaguuag

SEQ ID NO: 2990 - RNA, 23 nt, Homo sapiens
cuaacugcacuagaugcaccuua

SEQ ID NO: 2991 - RNA, 22 nt, Homo sapiens
cuccuauaugaugccuuucuuc

SEQ ID NO: 2992 - RNA, 22 nt, Homo sapiens
gaagaaaggcaucauauaggag

SEQ ID NO: 2993 - RNA, 21 nt, Homo sapiens
gaacggcuucauacaggaguu

SEQ ID NO: 2994 - RNA, 21 nt, Homo sapiens
aacuccuguaugaagccguuc

SEQ ID NO: 2995 - RNA, 22 nt, Homo sapiens
ugugacugguugaccagagggg

SEQ ID NO: 2996 - RNA, 22 nt, Homo sapiens
ccccucuggucaaccagucaca

SEQ ID NO: 2997 - RNA, 23 nt, Homo sapiens
acugcccuaagugcuccuucugg

SEQ ID NO: 2998 - RNA, 23 nt, Homo sapiens
ccagaaggagcacuuagggcagu

SEQ ID NO: 2999 - RNA, 23 nt, Homo sapiens
uaaggugcaucuagugcagauag

SEQ ID NO: 3000 - RNA, 23 nt, Homo sapiens
cuaucugcacuagaugcaccuua

SEQ ID NO: 3001 - RNA, 22 nt, Homo sapiens
cagugcaaugaugaaagggcau

SEQ ID NO: 3002 - RNA, 22 nt, Homo sapiens
augcccuuucaucauugcacug

SEQ ID NO: 3003 - RNA, 21 nt, Homo sapiens
acucuuucccuguugcacuac

SEQ ID NO: 3004 - RNA, 21 nt, Homo sapiens
guagugcaacagggaaagagu

SEQ ID NO: 3005 - RNA, 24 nt, Homo sapiens
uuuggcaaugguagaacucacacu

SEQ ID NO: 3006 - RNA, 24 nt, Homo sapiens
agugugaguucuaccauugccaaa

SEQ ID NO: 3007 - RNA, 21 nt, Homo sapiens
agggcccccccucaauccugu

SEQ ID NO: 3008 - RNA, 21 nt, Homo sapiens
acaggauugagggggggcccu

SEQ ID NO: 3009 - RNA, 22 nt, Homo sapiens
cagugcaauguuaaaagggcau

SEQ ID NO: 3010 - RNA, 22 nt, Homo sapiens
augcccuuuuaacauugcacug

SEQ ID NO: 3011 - RNA, 22 nt, Homo sapiens
uucacauugugcuacugucugc

SEQ ID NO: 3012 - RNA, 22 nt, Homo sapiens
gcagacaguagcacaaugugaa

SEQ ID NO: 3013 - RNA, 22 nt, Homo sapiens
ucggauccgucugagcuuggcu

SEQ ID NO: 3014 - RNA, 22 nt, Homo sapiens
agccaagcucagacggauccga

SEQ ID NO: 3015 - RNA, 22 nt, Homo sapiens
cugaagcucagagggcucugau

SEQ ID NO: 3016 - RNA, 22 nt, Homo sapiens
aucagagcccucugagcuucag

SEQ ID NO: 3017 - RNA, 22 nt, Homo sapiens
ccucuuccccuugucucuccag

SEQ ID NO: 3018 - RNA, 22 nt, Homo sapiens
cuggagagacaaggggaagagg

SEQ ID NO: 3019 - RNA, 22 nt, Homo sapiens
ugagugacaggggaaaugggga

SEQ ID NO: 3020 - RNA, 22 nt, Homo sapiens
uccccauuuccccugucacuca

SEQ ID NO: 3021 - RNA, 22 nt, Homo sapiens
ucaggacacuucugaacuugga

SEQ ID NO: 3022 - RNA, 22 nt, Homo sapiens
uccaaguucagaaguguccuga

SEQ ID NO: 3023 - RNA, 22 nt, Homo sapiens
caguucagaaguguuccugagu

SEQ ID NO: 3024 - RNA, 22 nt, Homo sapiens
acucaggaacacuucugaacug

SEQ ID NO: 3025 - RNA, 21 nt, Homo sapiens
uuucccuuuccauccuggcag

SEQ ID NO: 3026 - RNA, 21 nt, Homo sapiens
cugccaggauggaaagggaaa

SEQ ID NO: 3027 - RNA, 21 nt, Homo sapiens
uugccagggcaggagguggaa

SEQ ID NO: 3028 - RNA, 21 nt, Homo sapiens
uuccaccuccugcccuggcaa

SEQ ID NO: 3029 - RNA, 21 nt, Homo sapiens
agagauugguagaaaucaggu

SEQ ID NO: 3030 - RNA, 21 nt, Homo sapiens
accugauuucuaccaaucucu

SEQ ID NO: 3031 - RNA, 23 nt, Homo sapiens
aaucggacccauuuaaaccggag

SEQ ID NO: 3032 - RNA, 23 nt, Homo sapiens
cuccgguuuaaauggguccgauu

SEQ ID NO: 3033 - RNA, 24 nt, Homo sapiens
ucugggcacaggcggauggacagg

SEQ ID NO: 3034 - RNA, 24 nt, Homo sapiens
ccuguccauccgccugugcccaga

SEQ ID NO: 3035 - RNA, 21 nt, Homo sapiens
ccagugacugagcuggagcca

SEQ ID NO: 3036 - RNA, 21 nt, Homo sapiens
uggcuccagcucagucacugg

SEQ ID NO: 3037 - RNA, 22 nt, Homo sapiens
aggauaggaagaaugaagugcu

SEQ ID NO: 3038 - RNA, 22 nt, Homo sapiens
agcacuucauucuuccuauccu

SEQ ID NO: 3039 - RNA, 22 nt, Homo sapiens
aggagaguggauuccagguggu

SEQ ID NO: 3040 - RNA, 22 nt, Homo sapiens
accaccuggaauccacucuccu

SEQ ID NO: 3041 - RNA, 22 nt, Homo sapiens
uccuccucuaccucaucccagu

SEQ ID NO: 3042 - RNA, 22 nt, Homo sapiens
acugggaugagguagaggagga

SEQ ID NO: 3043 - RNA, 22 nt, Homo sapiens
ugagggguuuggaaugggaugg

SEQ ID NO: 3044 - RNA, 22 nt, Homo sapiens
ccaucccauuccaaaccccuca

SEQ ID NO: 3045 - RNA, 21 nt, Homo sapiens
auccaguucucugagggggcu

SEQ ID NO: 3046 - RNA, 21 nt, Homo sapiens
agcccccucagagaacuggau

SEQ ID NO: 3047 - RNA, 22 nt, Homo sapiens
aaccccuaaggcaacuggaugg

SEQ ID NO: 3048 - RNA, 22 nt, Homo sapiens
ccauccaguugccuuagggguu

SEQ ID NO: 3049 - RNA, 21 nt, Homo sapiens
ucauccucgucucccucccag

SEQ ID NO: 3050 - RNA, 21 nt, Homo sapiens
cugggagggagacgaggauga

SEQ ID NO: 3051 - RNA, 22 nt, Homo sapiens
agggaaggggacgaggguuggg

SEQ ID NO: 3052 - RNA, 22 nt, Homo sapiens
cccaacccucguccccuucccu

SEQ ID NO: 3053 - RNA, 23 nt, Homo sapiens
aagaagagacugagucaucgaau

SEQ ID NO: 3054 - RNA, 23 nt, Homo sapiens
auucgaugacucagucucuucuu

SEQ ID NO: 3055 - RNA, 23 nt, Homo sapiens
caauggcacaaacucauucuuga

SEQ ID NO: 3056 - RNA, 23 nt, Homo sapiens
ucaagaaugaguuugugccauug

SEQ ID NO: 3057 - RNA, 21 nt, Homo sapiens
acugaauccucuuuuccucag

SEQ ID NO: 3058 - RNA, 21 nt, Homo sapiens
cugaggaaaagaggauucagu

SEQ ID NO: 3059 - RNA, 22 nt, Homo sapiens
ugggaugagggauugaagugga

SEQ ID NO: 3060 - RNA, 22 nt, Homo sapiens
uccacuucaaucccucauccca

SEQ ID NO: 3061 - RNA, 22 nt, Homo sapiens
caggccauauugugcugccuca

SEQ ID NO: 3062 - RNA, 22 nt, Homo sapiens
ugaggcagcacaauauggccug

SEQ ID NO: 3063 - RNA, 22 nt, Homo sapiens
uagcagcacauaaugguuugug

SEQ ID NO: 3064 - RNA, 22 nt, Homo sapiens
cacaaaccauuaugugcugcua

SEQ ID NO: 3065 - RNA, 22 nt, Homo sapiens
cgaaucauuauuugcugcucua

SEQ ID NO: 3066 - RNA, 22 nt, Homo sapiens
uagagcagcaaauaaugauucg

SEQ ID NO: 3067 - RNA, 22 nt, Homo sapiens
uagcagcacaucaugguuuaca

SEQ ID NO: 3068 - RNA, 22 nt, Homo sapiens
uguaaaccaugaugugcugcua

SEQ ID NO: 3069 - RNA, 22 nt, Homo sapiens
ccaauauuacugugcugcuuua

SEQ ID NO: 3070 - RNA, 22 nt, Homo sapiens
uaaagcagcacaguaauauugg

SEQ ID NO: 3071 - RNA, 22 nt, Homo sapiens
cuagguauggucccagggaucc

SEQ ID NO: 3072 - RNA, 22 nt, Homo sapiens
ggaucccugggaccauaccuag

SEQ ID NO: 3073 - RNA, 20 nt, Homo sapiens
guguguggaaaugcuucugc

SEQ ID NO: 3074 - RNA, 20 nt, Homo sapiens
gcagaagcauuuccacacac

SEQ ID NO: 3075 - RNA, 22 nt, Homo sapiens
gugugcggaaaugcuucugcua

SEQ ID NO: 3076 - RNA, 22 nt, Homo sapiens
uagcagaagcauuuccgcacac

SEQ ID NO: 3077 - RNA, 23 nt, Homo sapiens
agcagcauuguacagggcuauca

SEQ ID NO: 3078 - RNA, 23 nt, Homo sapiens
ugauagcccuguacaaugcugcu

SEQ ID NO: 3079 - RNA, 22 nt, Homo sapiens
aacuggcccucaaagucccgcu

SEQ ID NO: 3080 - RNA, 22 nt, Homo sapiens
agcgggacuuugagggccaguu

SEQ ID NO: 3081 - RNA, 22 nt, Homo sapiens
cgggguuuugagggcgagauga

SEQ ID NO: 3082 - RNA, 22 nt, Homo sapiens
ucaucucgcccucaaaaccccg

SEQ ID NO: 3083 - RNA, 21 nt, Homo sapiens
gcagggacagcaaaggggugc

SEQ ID NO: 3084 - RNA, 21 nt, Homo sapiens
gcaccccuuugcugucccugc

SEQ ID NO: 3085 - RNA, 22 nt, Homo sapiens
uucccuuugucauccuucgccu

SEQ ID NO: 3086 - RNA, 22 nt, Homo sapiens
aggcgaaggaugacaaagggaa

SEQ ID NO: 3087 - RNA, 23 nt, Homo sapiens
auggccaaaacugcaguuauuuu

SEQ ID NO: 3088 - RNA, 23 nt, Homo sapiens
aaaauaacugcaguuuuggccau

SEQ ID NO: 3089 - RNA, 25 nt, Homo sapiens
aaaaaccacaauuacuuuugcacca

SEQ ID NO: 3090 - RNA, 25 nt, Homo sapiens
uggugcaaaaguaauugugguuuuu

SEQ ID NO: 3091 - RNA, 21 nt, Homo sapiens
caaaagugaucgugguuuuug

SEQ ID NO: 3092 - RNA, 21 nt, Homo sapiens
caaaaaccacgaucacuuuug

SEQ ID NO: 3093 - RNA, 23 nt, Homo sapiens
caaagacugcaauuacuuuugcg

SEQ ID NO: 3094 - RNA, 23 nt, Homo sapiens
cgcaaaaguaauugcagucuuug

SEQ ID NO: 3095 - RNA, 23 nt, Homo sapiens
aaaaguaacugcgguuuuugccu

SEQ ID NO: 3096 - RNA, 23 nt, Homo sapiens
aggcaaaaaccgcaguuacuuuu

SEQ ID NO: 3097 - RNA, 22 nt, Homo sapiens
ugccuggaacauaguagggacu

SEQ ID NO: 3098 - RNA, 22 nt, Homo sapiens
agucccuacuauguuccaggca

SEQ ID NO: 3099 - RNA, 21 nt, Homo sapiens
auaggacucauauagugccag

SEQ ID NO: 3100 - RNA, 21 nt, Homo sapiens
cuggcacuauaugaguccuau

SEQ ID NO: 3101 - RNA, 20 nt, Homo sapiens
agacacuauacgagucauau

SEQ ID NO: 3102 - RNA, 20 nt, Homo sapiens
auaugacucguauagugucu

SEQ ID NO: 3103 - RNA, 23 nt, Homo sapiens
ugugacugcauuaugaaaauucu

SEQ ID NO: 3104 - RNA, 23 nt, Homo sapiens
agaauuuucauaaugcagucaca

SEQ ID NO: 3105 - RNA, 20 nt, Homo sapiens
uggcuuuuaacuuugauggc

SEQ ID NO: 3106 - RNA, 20 nt, Homo sapiens
gccaucaaaguuaaaagcca

SEQ ID NO: 3107 - RNA, 21 nt, Homo sapiens
cacagcaaguguagacaggca

SEQ ID NO: 3108 - RNA, 21 nt, Homo sapiens
ugccugucuacacuugcugug

SEQ ID NO: 3109 - RNA, 21 nt, Homo sapiens
ccugucugugccugcuguaca

SEQ ID NO: 3110 - RNA, 21 nt, Homo sapiens
uguacagcaggcacagacagg

SEQ ID NO: 3111 - RNA, 22 nt, Homo sapiens
uaaauagaguaggcaaaggaca

SEQ ID NO: 3112 - RNA, 22 nt, Homo sapiens
uguccuuugccuacucuauuua

SEQ ID NO: 3113 - RNA, 22 nt, Homo sapiens
uccuuugccuauucuauuuaag

SEQ ID NO: 3114 - RNA, 22 nt, Homo sapiens
cuuaaauagaauaggcaaagga

SEQ ID NO: 3115 - RNA, 22 nt, Homo sapiens
guugggacaagaggacggucuu

SEQ ID NO: 3116 - RNA, 22 nt, Homo sapiens
aagaccguccucuugucccaac

SEQ ID NO: 3117 - RNA, 17 nt, Homo sapiens
cagagaauuguuuaauc

SEQ ID NO: 3118 - RNA, 17 nt, Homo sapiens
gauuaaacaauucucug

SEQ ID NO: 3119 - RNA, 20 nt, Homo sapiens
uagaggaagcuguggagaga

SEQ ID NO: 3120 - RNA, 20 nt, Homo sapiens
ucucuccacagcuuccucua

SEQ ID NO: 3121 - RNA, 22 nt, Homo sapiens
uccccuucugcaggccugcugg

SEQ ID NO: 3122 - RNA, 22 nt, Homo sapiens
ccagcaggccugcagaagggga

SEQ ID NO: 3123 - RNA, 23 nt, Homo sapiens
aucagggcuuguggaaugggaag

SEQ ID NO: 3124 - RNA, 23 nt, Homo sapiens
cuucccauuccacaagcccugau

SEQ ID NO: 3125 - RNA, 23 nt, Homo sapiens
ucuggcaaguaaaaaacucucau

SEQ ID NO: 3126 - RNA, 23 nt, Homo sapiens
augagaguuuuuuacuugccaga

SEQ ID NO: 3127 - RNA, 23 nt, Homo sapiens
ucgaggacugguggaagggccuu

SEQ ID NO: 3128 - RNA, 23 nt, Homo sapiens
aaggcccuuccaccaguccucga

SEQ ID NO: 3129 - RNA, 24 nt, Homo sapiens
uggguagagaaggagcucagagga

SEQ ID NO: 3130 - RNA, 24 nt, Homo sapiens
uccucugagcuccuucucuaccca

SEQ ID NO: 3131 - RNA, 22 nt, Homo sapiens
uaaagaacucuuaaaacccaau

SEQ ID NO: 3132 - RNA, 22 nt, Homo sapiens
auuggguuuuaagaguucuuua

SEQ ID NO: 3133 - RNA, 23 nt, Homo sapiens
ugauggauaaaagacuacauauu

SEQ ID NO: 3134 - RNA, 23 nt, Homo sapiens
aauauguagucuuuuauccauca

SEQ ID NO: 3135 - RNA, 22 nt, Homo sapiens
ugccuaggcugagacugcagug

SEQ ID NO: 3136 - RNA, 22 nt, Homo sapiens
cacugcagucucagccuaggca

SEQ ID NO: 3137 - RNA, 22 nt, Homo sapiens
uggcccaaccuauucaguuagu

SEQ ID NO: 3138 - RNA, 22 nt, Homo sapiens
acuaacugaauagguugggcca

SEQ ID NO: 3139 - RNA, 23 nt, Homo sapiens
cugacugaauagguagggucauu

SEQ ID NO: 3140 - RNA, 23 nt, Homo sapiens
aaugacccuaccuauucagucag

SEQ ID NO: 3141 - RNA, 24 nt, Homo sapiens
ucuguagccugggagcaauggggu

SEQ ID NO: 3142 - RNA, 24 nt, Homo sapiens
accccauugcucccaggcuacaga

SEQ ID NO: 3143 - RNA, 23 nt, Homo sapiens
uaggagcucaacagaugccuguu

SEQ ID NO: 3144 - RNA, 23 nt, Homo sapiens
aacaggcaucuguugagcuccua

SEQ ID NO: 3145 - RNA, 19 nt, Homo sapiens
gagggcggguggaggagga

SEQ ID NO: 3146 - RNA, 19 nt, Homo sapiens
uccuccuccacccgcccuc

SEQ ID NO: 3147 - RNA, 25 nt, Homo sapiens
auaacauuguaaagcgcuucuuucg

SEQ ID NO: 3148 - RNA, 25 nt, Homo sapiens
cgaaagaagcgcuuuacaauguuau

SEQ ID NO: 3149 - RNA, 24 nt, Homo sapiens
agauauuuugaguguuuggaauug

SEQ ID NO: 3150 - RNA, 24 nt, Homo sapiens
caauuccaaacacucaaaauaucu

SEQ ID NO: 3151 - RNA, 22 nt, Homo sapiens
aacuccaaacacucaaaacuca

SEQ ID NO: 3152 - RNA, 22 nt, Homo sapiens
ugaguuuugaguguuuggaguu

SEQ ID NO: 3153 - RNA, 22 nt, Homo sapiens
caugcuaggauagaaagaaugg

SEQ ID NO: 3154 - RNA, 22 nt, Homo sapiens
ccauucuuucuauccuagcaug

SEQ ID NO: 3155 - RNA, 24 nt, Homo sapiens
gguugggcagugaggaggguguga

SEQ ID NO: 3156 - RNA, 24 nt, Homo sapiens
ucacacccuccucacugcccaacc

SEQ ID NO: 3157 - RNA, 22 nt, Homo sapiens
uggaaaaaacuggugugugcuu

SEQ ID NO: 3158 - RNA, 22 nt, Homo sapiens
aagcacacaccaguuuuuucca

SEQ ID NO: 3159 - RNA, 22 nt, Homo sapiens
cuggggagauccucgagguugg

SEQ ID NO: 3160 - RNA, 22 nt, Homo sapiens
ccaaccucgaggaucuccccag

SEQ ID NO: 3161 - RNA, 22 nt, Homo sapiens
caaccucgacgaucuccucagc

SEQ ID NO: 3162 - RNA, 22 nt, Homo sapiens
gcugaggagaucgucgagguug

SEQ ID NO: 3163 - RNA, 21 nt, Homo sapiens
ugaggagaucgucgagguugg

SEQ ID NO: 3164 - RNA, 21 nt, Homo sapiens
ccaaccucgacgaucuccuca

SEQ ID NO: 3165 - RNA, 22 nt, Homo sapiens
caaccucgaggaucuccccagc

SEQ ID NO: 3166 - RNA, 22 nt, Homo sapiens
gcuggggagauccucgagguug

SEQ ID NO: 3167 - RNA, 21 nt, Homo sapiens
gguggggcaaugggaucaggu

SEQ ID NO: 3168 - RNA, 21 nt, Homo sapiens
accugaucccauugccccacc

SEQ ID NO: 3169 - RNA, 23 nt, Homo sapiens
ggggaaagcgaguagggacauuu

SEQ ID NO: 3170 - RNA, 23 nt, Homo sapiens
aaaugucccuacucgcuuucccc

SEQ ID NO: 3171 - RNA, 22 nt, Homo sapiens
cagaaggggaguugggagcaga

SEQ ID NO: 3172 - RNA, 22 nt, Homo sapiens
ucugcucccaacuccccuucug

SEQ ID NO: 3173 - RNA, 21 nt, Homo sapiens
ccaggcucugcagugggaacu

SEQ ID NO: 3174 - RNA, 21 nt, Homo sapiens
aguucccacugcagagccugg

SEQ ID NO: 3175 - RNA, 21 nt, Homo sapiens
cucccacuuccagaucuuucu

SEQ ID NO: 3176 - RNA, 21 nt, Homo sapiens
agaaagaucuggaagugggag

SEQ ID NO: 3177 - RNA, 22 nt, Homo sapiens
aaagaucuggaagugggagaca

SEQ ID NO: 3178 - RNA, 22 nt, Homo sapiens
ugucucccacuuccagaucuuu

SEQ ID NO: 3179 - RNA, 22 nt, Homo sapiens
cugcccuagucuagcugaagcu

SEQ ID NO: 3180 - RNA, 22 nt, Homo sapiens
agcuucagcuagacuagggcag

SEQ ID NO: 3181 - RNA, 22 nt, Homo sapiens
uucagccaggcuagugcagucu

SEQ ID NO: 3182 - RNA, 22 nt, Homo sapiens
agacugcacuagccuggcugaa

SEQ ID NO: 3183 - RNA, 22 nt, Homo sapiens
uaggauuacaagugucggccac

SEQ ID NO: 3184 - RNA, 22 nt, Homo sapiens
guggccgacacuuguaauccua

SEQ ID NO: 3185 - RNA, 22 nt, Homo sapiens
agagcugagacuagaaagccca

SEQ ID NO: 3186 - RNA, 22 nt, Homo sapiens
ugggcuuucuagucucagcucu

SEQ ID NO: 3187 - RNA, 22 nt, Homo sapiens
ggcuuucuagucucagcucucc

SEQ ID NO: 3188 - RNA, 22 nt, Homo sapiens
ggagagcugagacuagaaagcc

SEQ ID NO: 3189 - RNA, 23 nt, Homo sapiens
cugauaagaacagaggcccagau

SEQ ID NO: 3190 - RNA, 23 nt, Homo sapiens
aucugggccucuguucuuaucag

SEQ ID NO: 3191 - RNA, 21 nt, Homo sapiens
ucccuaccccuccacucccca

SEQ ID NO: 3192 - RNA, 21 nt, Homo sapiens
uggggaguggagggguaggga

SEQ ID NO: 3193 - RNA, 23 nt, Homo sapiens
uuagggaguagaaggguggggag

SEQ ID NO: 3194 - RNA, 23 nt, Homo sapiens
cuccccacccuucuacucccuaa

SEQ ID NO: 3195 - RNA, 22 nt, Homo sapiens
uauaaaaugagggcaguaagac

SEQ ID NO: 3196 - RNA, 22 nt, Homo sapiens
gucuuacugcccucauuuuaua

SEQ ID NO: 3197 - RNA, 22 nt, Homo sapiens
ugugacuuuaagggaaauggcg

SEQ ID NO: 3198 - RNA, 22 nt, Homo sapiens
cgccauuucccuuaaagucaca

SEQ ID NO: 3199 - RNA, 22 nt, Homo sapiens
agguggaugcaaugugaccuca

SEQ ID NO: 3200 - RNA, 22 nt, Homo sapiens
ugaggucacauugcauccaccu

SEQ ID NO: 3201 - RNA, 23 nt, Homo sapiens
cgcagacaaugccuacuggccua

SEQ ID NO: 3202 - RNA, 23 nt, Homo sapiens
uaggccaguaggcauugucugcg

SEQ ID NO: 3203 - RNA, 17 nt, Homo sapiens
gaguucuacagucagac

SEQ ID NO: 3204 - RNA, 17 nt, Homo sapiens
gucugacuguagaacuc

SEQ ID NO: 3205 - RNA, 22 nt, Homo sapiens
uaggacugugcuuggcacauag

SEQ ID NO: 3206 - RNA, 22 nt, Homo sapiens
cuaugugccaagcacaguccua

SEQ ID NO: 3207 - RNA, 22 nt, Homo sapiens
cugggguucugagacagacagu

SEQ ID NO: 3208 - RNA, 22 nt, Homo sapiens
acugucugucucagaaccccag

SEQ ID NO: 3209 - RNA, 22 nt, Homo sapiens
aaaggaggaaauaggcaggcca

SEQ ID NO: 3210 - RNA, 22 nt, Homo sapiens
uggccugccuauuuccuccuuu

SEQ ID NO: 3211 - RNA, 22 nt, Homo sapiens
ugcccugccuguuuucuccuuu

SEQ ID NO: 3212 - RNA, 22 nt, Homo sapiens
aaaggagaaaacaggcagggca

SEQ ID NO: 3213 - RNA, 23 nt, Homo sapiens
uagugaguuagagaugcagagcc

SEQ ID NO: 3214 - RNA, 23 nt, Homo sapiens
ggcucugcaucucuaacucacua

SEQ ID NO: 3215 - RNA, 19 nt, Homo sapiens
acuggccugggacuaccgg

SEQ ID NO: 3216 - RNA, 19 nt, Homo sapiens
ccgguagucccaggccagu

SEQ ID NO: 3217 - RNA, 21 nt, Homo sapiens
ugcacggcacuggggacacgu

SEQ ID NO: 3218 - RNA, 21 nt, Homo sapiens
acguguccccagugccgugca

SEQ ID NO: 3219 - RNA, 23 nt, Homo sapiens
uguguacacacgugccaggcgcu

SEQ ID NO: 3220 - RNA, 23 nt, Homo sapiens
agcgccuggcacguguguacaca

SEQ ID NO: 3221 - RNA, 17 nt, Homo sapiens
ggggcgcggccggaucg

SEQ ID NO: 3222 - RNA, 17 nt, Homo sapiens
cgauccggccgcgcccc

SEQ ID NO: 3223 - RNA, 22 nt, Homo sapiens
agaaggggugaaauuuaaacgu

SEQ ID NO: 3224 - RNA, 22 nt, Homo sapiens
acguuuaaauuucaccccuucu

SEQ ID NO: 3225 - RNA, 19 nt, Homo sapiens
aucgggcccucggcgccgg

SEQ ID NO: 3226 - RNA, 19 nt, Homo sapiens
ccggcgccgagggcccgau

SEQ ID NO: 3227 - RNA, 17 nt, Homo sapiens
gcuucuguaguguaguc

SEQ ID NO: 3228 - RNA, 17 nt, Homo sapiens
gacuacacuacagaagc

SEQ ID NO: 3229 - RNA, 22 nt, Homo sapiens
gccucucucggagucgcucgga

SEQ ID NO: 3230 - RNA, 22 nt, Homo sapiens
uccgagcgacuccgagagaggc

SEQ ID NO: 3231 - RNA, 23 nt, Homo sapiens
aaagucucgcucucugccccuca

SEQ ID NO: 3232 - RNA, 23 nt, Homo sapiens
ugaggggcagagagcgagacuuu

SEQ ID NO: 3233 - RNA, 24 nt, Homo sapiens
ugaggggccucagaccgagcuuuu

SEQ ID NO: 3234 - RNA, 24 nt, Homo sapiens
aaaagcucggucugaggccccuca

SEQ ID NO: 3235 - RNA, 23 nt, Homo sapiens
agaagaaggcggucggucugcgg

SEQ ID NO: 3236 - RNA, 23 nt, Homo sapiens
ccgcagaccgaccgccuucuucu

SEQ ID NO: 3237 - RNA, 20 nt, Homo sapiens
uuggccauggggcugcgcgg

SEQ ID NO: 3238 - RNA, 20 nt, Homo sapiens
ccgcgcagccccauggccaa

SEQ ID NO: 3239 - RNA, 23 nt, Homo sapiens
ccugggcagcguguggcugaagg

SEQ ID NO: 3240 - RNA, 23 nt, Homo sapiens
ccuucagccacacgcugcccagg

SEQ ID NO: 3241 - RNA, 23 nt, Homo sapiens
agaggcuuugugcggauacgggg

SEQ ID NO: 3242 - RNA, 23 nt, Homo sapiens
ccccguauccgcacaaagccucu

SEQ ID NO: 3243 - RNA, 21 nt, Homo sapiens
cccuugggucugaugggguag

SEQ ID NO: 3244 - RNA, 21 nt, Homo sapiens
cuaccccaucagacccaaggg

SEQ ID NO: 3245 - RNA, 25 nt, Homo sapiens
ugccccaucugugcccuggguagga

SEQ ID NO: 3246 - RNA, 25 nt, Homo sapiens
uccuacccagggcacagauggggca

SEQ ID NO: 3247 - RNA, 23 nt, Homo sapiens
uguggaagguagacggccagaga

SEQ ID NO: 3248 - RNA, 23 nt, Homo sapiens
ucucuggccgucuaccuuccaca

SEQ ID NO: 3249 - RNA, 20 nt, Homo sapiens
ucuggccagcuacgucccca

SEQ ID NO: 3250 - RNA, 20 nt, Homo sapiens
uggggacguagcuggccaga

SEQ ID NO: 3251 - RNA, 23 nt, Homo sapiens
uggggacguagcuggccagacag

SEQ ID NO: 3252 - RNA, 23 nt, Homo sapiens
cugucuggccagcuacgucccca

SEQ ID NO: 3253 - RNA, 22 nt, Homo sapiens
cucucuggccgucuaccuucca

SEQ ID NO: 3254 - RNA, 22 nt, Homo sapiens
uggaagguagacggccagagag

SEQ ID NO: 3255 - RNA, 23 nt, Homo sapiens
ucugggagguuguagcaguggaa

SEQ ID NO: 3256 - RNA, 23 nt, Homo sapiens
uuccacugcuacaaccucccaga

SEQ ID NO: 3257 - RNA, 22 nt, Homo sapiens
uccugcguaggaucugaggagu

SEQ ID NO: 3258 - RNA, 22 nt, Homo sapiens
acuccucagauccuacgcagga

SEQ ID NO: 3259 - RNA, 22 nt, Homo sapiens
agcucugcugcucacuggcagu

SEQ ID NO: 3260 - RNA, 22 nt, Homo sapiens
acugccagugagcagcagagcu

SEQ ID NO: 3261 - RNA, 21 nt, Homo sapiens
ggccagccaccaggagggcug

SEQ ID NO: 3262 - RNA, 21 nt, Homo sapiens
cagcccuccugguggcuggcc

SEQ ID NO: 3263 - RNA, 17 nt, Homo sapiens
cgcgccgggcccggguu

SEQ ID NO: 3264 - RNA, 17 nt, Homo sapiens
aacccgggcccggcgcg

SEQ ID NO: 3265 - RNA, 23 nt, Homo sapiens
ggaggcgcaggcucggaaaggcg

SEQ ID NO: 3266 - RNA, 23 nt, Homo sapiens
cgccuuuccgagccugcgccucc

SEQ ID NO: 3267 - RNA, 22 nt, Homo sapiens
guggaguccuggggaauggaga

SEQ ID NO: 3268 - RNA, 22 nt, Homo sapiens
ucuccauuccccaggacuccac

SEQ ID NO: 3269 - RNA, 23 nt, Homo sapiens
agggacugccuuaggagaaaguu

SEQ ID NO: 3270 - RNA, 23 nt, Homo sapiens
aacuuucuccuaaggcagucccu

SEQ ID NO: 3271 - RNA, 17 nt, Homo sapiens
gggauaugaagaaaaau

SEQ ID NO: 3272 - RNA, 17 nt, Homo sapiens
auuuuucuucauauccc

SEQ ID NO: 3273 - RNA, 22 nt, Homo sapiens
uggaagggagaagagcuuuaau

SEQ ID NO: 3274 - RNA, 22 nt, Homo sapiens
auuaaagcucuucucccuucca

SEQ ID NO: 3275 - RNA, 22 nt, Homo sapiens
acuuuccucacucccgugaagu

SEQ ID NO: 3276 - RNA, 22 nt, Homo sapiens
acuucacgggagugaggaaagu

SEQ ID NO: 3277 - RNA, 21 nt, Homo sapiens
uucgcgggcgaaggcaaaguc

SEQ ID NO: 3278 - RNA, 21 nt, Homo sapiens
gacuuugccuucgcccgcgaa

SEQ ID NO: 3279 - RNA, 22 nt, Homo sapiens
caucuggcauccgucacacaga

SEQ ID NO: 3280 - RNA, 22 nt, Homo sapiens
ucugugugacggaugccagaug

SEQ ID NO: 3281 - RNA, 22 nt, Homo sapiens
ugagggacagaugccagaagca

SEQ ID NO: 3282 - RNA, 22 nt, Homo sapiens
ugcuucuggcaucugucccuca

SEQ ID NO: 3283 - RNA, 22 nt, Homo sapiens
aaacuaaucucuacacugcugc

SEQ ID NO: 3284 - RNA, 22 nt, Homo sapiens
gcagcaguguagagauuaguuu

SEQ ID NO: 3285 - RNA, 22 nt, Homo sapiens
gcaguaguguagagauugguuu

SEQ ID NO: 3286 - RNA, 22 nt, Homo sapiens
aaaccaaucucuacacuacugc

SEQ ID NO: 3287 - RNA, 21 nt, Homo sapiens
gcugcaccggagacuggguaa

SEQ ID NO: 3288 - RNA, 21 nt, Homo sapiens
uuacccagucuccggugcagc

SEQ ID NO: 3289 - RNA, 21 nt, Homo sapiens
uacccagucuccggugcagcc

SEQ ID NO: 3290 - RNA, 21 nt, Homo sapiens
ggcugcaccggagacugggua

SEQ ID NO: 3291 - RNA, 24 nt, Homo sapiens
uguggacagugagguagagggagu

SEQ ID NO: 3292 - RNA, 24 nt, Homo sapiens
acucccucuaccucacuguccaca

SEQ ID NO: 3293 - RNA, 22 nt, Homo sapiens
agcuuuugggaauucagguagu

SEQ ID NO: 3294 - RNA, 22 nt, Homo sapiens
acuaccugaauucccaaaagcu

SEQ ID NO: 3295 - RNA, 21 nt, Homo sapiens
accugaauuaccaaaagcuuu

SEQ ID NO: 3296 - RNA, 21 nt, Homo sapiens
aaagcuuuugguaauucaggu

SEQ ID NO: 3297 - RNA, 22 nt, Homo sapiens
auauaccuguucggucucuuua

SEQ ID NO: 3298 - RNA, 22 nt, Homo sapiens
uaaagagaccgaacagguauau

SEQ ID NO: 3299 - RNA, 22 nt, Homo sapiens
aggggaccaaagagauauauag

SEQ ID NO: 3300 - RNA, 22 nt, Homo sapiens
cuauauaucucuuugguccccu

SEQ ID NO: 3301 - RNA, 23 nt, Homo sapiens
uuuguauggauauguguguguau

SEQ ID NO: 3302 - RNA, 23 nt, Homo sapiens
auacacacacauauccauacaaa

SEQ ID NO: 3303 - RNA, 22 nt, Homo sapiens
uguguuagaauaggggcaauaa

SEQ ID NO: 3304 - RNA, 22 nt, Homo sapiens
uuauugccccuauucuaacaca

SEQ ID NO: 3305 - RNA, 22 nt, Homo sapiens
auugccucuguucuaacacaag

SEQ ID NO: 3306 - RNA, 22 nt, Homo sapiens
cuuguguuagaacagaggcaau

SEQ ID NO: 3307 - RNA, 22 nt, Homo sapiens
aagggcuuccucucugcaggac

SEQ ID NO: 3308 - RNA, 22 nt, Homo sapiens
guccugcagagaggaagcccuu

SEQ ID NO: 3309 - RNA, 21 nt, Homo sapiens
ccugcagagaggaagcccuuc

SEQ ID NO: 3310 - RNA, 21 nt, Homo sapiens
gaagggcuuccucucugcagg

SEQ ID NO: 3311 - RNA, 22 nt, Homo sapiens
aggauuucagaaauacuggugu

SEQ ID NO: 3312 - RNA, 22 nt, Homo sapiens
acaccaguauuucugaaauccu

SEQ ID NO: 3313 - RNA, 24 nt, Homo sapiens
agauguauggaaucuguauauauc

SEQ ID NO: 3314 - RNA, 24 nt, Homo sapiens
gauauauacagauuccauacaucu

SEQ ID NO: 3315 - RNA, 22 nt, Homo sapiens
cggggagagaacgcagugacgu

SEQ ID NO: 3316 - RNA, 22 nt, Homo sapiens
acgucacugcguucucuccccg

SEQ ID NO: 3317 - RNA, 19 nt, Homo sapiens
uggggcggagcuuccggag

SEQ ID NO: 3318 - RNA, 19 nt, Homo sapiens
cuccggaagcuccgcccca

SEQ ID NO: 3319 - RNA, 21 nt, Homo sapiens
ucacgcggagagauggcuuug

SEQ ID NO: 3320 - RNA, 21 nt, Homo sapiens
caaagccaucucuccgcguga

SEQ ID NO: 3321 - RNA, 22 nt, Homo sapiens
caggcgucugucuacguggcuu

SEQ ID NO: 3322 - RNA, 22 nt, Homo sapiens
aagccacguagacagacgccug

SEQ ID NO: 3323 - RNA, 22 nt, Homo sapiens
caccuugcgcuacucaggucug

SEQ ID NO: 3324 - RNA, 22 nt, Homo sapiens
cagaccugaguagcgcaaggug

SEQ ID NO: 3325 - RNA, 22 nt, Homo sapiens
aaucugagaaggcgcacaaggu

SEQ ID NO: 3326 - RNA, 22 nt, Homo sapiens
accuugugcgccuucucagauu

SEQ ID NO: 3327 - RNA, 22 nt, Homo sapiens
aaggccuuucugaaccuucaga

SEQ ID NO: 3328 - RNA, 22 nt, Homo sapiens
ucugaagguucagaaaggccuu

SEQ ID NO: 3329 - RNA, 22 nt, Homo sapiens
gugacaucacauauacggcagc

SEQ ID NO: 3330 - RNA, 22 nt, Homo sapiens
gcugccguauaugugaugucac

SEQ ID NO: 3331 - RNA, 24 nt, Homo sapiens
ucagaacaaaugccgguucccaga

SEQ ID NO: 3332 - RNA, 24 nt, Homo sapiens
ucugggaaccggcauuuguucuga

SEQ ID NO: 3333 - RNA, 22 nt, Homo sapiens
ugagaaccacgucugcucugag

SEQ ID NO: 3334 - RNA, 22 nt, Homo sapiens
cucagagcagacgugguucuca

SEQ ID NO: 3335 - RNA, 17 nt, Homo sapiens
ucauauugcuucuuucu

SEQ ID NO: 3336 - RNA, 17 nt, Homo sapiens
agaaagaagcaauauga

SEQ ID NO: 3337 - RNA, 22 nt, Homo sapiens
ugugacagauugauaacugaaa

SEQ ID NO: 3338 - RNA, 22 nt, Homo sapiens
uuucaguuaucaaucugucaca

SEQ ID NO: 3339 - RNA, 23 nt, Homo sapiens
uggaguccaggaaucugcauuuu

SEQ ID NO: 3340 - RNA, 23 nt, Homo sapiens
aaaaugcagauuccuggacucca

SEQ ID NO: 3341 - RNA, 22 nt, Homo sapiens
aagcccuuaccccaaaaaguau

SEQ ID NO: 3342 - RNA, 22 nt, Homo sapiens
auacuuuuugggguaagggcuu

SEQ ID NO: 3343 - RNA, 22 nt, Homo sapiens
aagcccuuaccccaaaaagcau

SEQ ID NO: 3344 - RNA, 22 nt, Homo sapiens
augcuuuuugggguaagggcuu

SEQ ID NO: 3345 - RNA, 22 nt, Homo sapiens
uggaauguaaggaagugugugg

SEQ ID NO: 3346 - RNA, 22 nt, Homo sapiens
ccacacacuuccuuacauucca

SEQ ID NO: 3347 - RNA, 22 nt, Homo sapiens
cuuaucagauuguauuguaauu

SEQ ID NO: 3348 - RNA, 22 nt, Homo sapiens
aauuacaauacaaucugauaag

SEQ ID NO: 3349 - RNA, 22 nt, Homo sapiens
uuauaauacaaccugauaagug

SEQ ID NO: 3350 - RNA, 22 nt, Homo sapiens
cacuuaucagguuguauuauaa

SEQ ID NO: 3351 - RNA, 22 nt, Homo sapiens
cuuagcagguuguauuaucauu

SEQ ID NO: 3352 - RNA, 22 nt, Homo sapiens
aaugauaauacaaccugcuaag

SEQ ID NO: 3353 - RNA, 22 nt, Homo sapiens
auauaauacaaccugcuaagug

SEQ ID NO: 3354 - RNA, 22 nt, Homo sapiens
cacuuagcagguuguauuauau

SEQ ID NO: 3355 - RNA, 22 nt, Homo sapiens
cacuuagcagguuguauuauau

SEQ ID NO: 3356 - RNA, 22 nt, Homo sapiens
auauaauacaaccugcuaagug

SEQ ID NO: 3357 - RNA, 22 nt, Homo sapiens
auaauacaaccugcuaagugcu

SEQ ID NO: 3358 - RNA, 22 nt, Homo sapiens
agcacuuagcagguuguauuau

SEQ ID NO: 3359 - RNA, 22 nt, Homo sapiens
uuugguccccuucaaccagcug

SEQ ID NO: 3360 - RNA, 22 nt, Homo sapiens
cagcugguugaaggggaccaaa

SEQ ID NO: 3361 - RNA, 22 nt, Homo sapiens
uuugguccccuucaaccagcua

SEQ ID NO: 3362 - RNA, 22 nt, Homo sapiens
uagcugguugaaggggaccaaa

SEQ ID NO: 3363 - RNA, 22 nt, Homo sapiens
uguaaacauccuugacuggaag

SEQ ID NO: 3364 - RNA, 22 nt, Homo sapiens
cuuccagucaaggauguuuaca

SEQ ID NO: 3365 - RNA, 22 nt, Homo sapiens
ugucaguuugucaaauacccca

SEQ ID NO: 3366 - RNA, 22 nt, Homo sapiens
ugggguauuugacaaacugaca

SEQ ID NO: 3367 - RNA, 22 nt, Homo sapiens
cguguauuugacaagcugaguu

SEQ ID NO: 3368 - RNA, 22 nt, Homo sapiens
aacucagcuugucaaauacacg

SEQ ID NO: 3369 - RNA, 21 nt, Homo sapiens
uucacaguggcuaaguuccgc

SEQ ID NO: 3370 - RNA, 21 nt, Homo sapiens
gcggaacuuagccacugugaa

SEQ ID NO: 3371 - RNA, 22 nt, Homo sapiens
agggcuuagcugcuugugagca

SEQ ID NO: 3372 - RNA, 22 nt, Homo sapiens
ugcucacaagcagcuaagcccu

SEQ ID NO: 3373 - RNA, 21 nt, Homo sapiens
aucacauugccagggauuacc

SEQ ID NO: 3374 - RNA, 21 nt, Homo sapiens
gguaaucccuggcaaugugau

SEQ ID NO: 3375 - RNA, 22 nt, Homo sapiens
uggguuccuggcaugcugauuu

SEQ ID NO: 3376 - RNA, 22 nt, Homo sapiens
aaaucagcaugccaggaaccca

SEQ ID NO: 3377 - RNA, 22 nt, Homo sapiens
cuuucagucggauguuuacagc

SEQ ID NO: 3378 - RNA, 22 nt, Homo sapiens
gcuguaaacauccgacugaaag

SEQ ID NO: 3379 - RNA, 22 nt, Homo sapiens
ugccuacugagcugauaucagu

SEQ ID NO: 3380 - RNA, 22 nt, Homo sapiens
acugauaucagcucaguaggca

SEQ ID NO: 3381 - RNA, 22 nt, Homo sapiens
ugccuacugagcugaaacacag

SEQ ID NO: 3382 - RNA, 22 nt, Homo sapiens
cuguguuucagcucaguaggca

SEQ ID NO: 3383 - RNA, 22 nt, Homo sapiens
uggcucaguucagcaggaacag

SEQ ID NO: 3384 - RNA, 22 nt, Homo sapiens
cuguuccugcugaacugagcca

SEQ ID NO: 3385 - RNA, 21 nt, Homo sapiens
uucacaguggcuaaguucugc

SEQ ID NO: 3386 - RNA, 21 nt, Homo sapiens
gcagaacuuagccacugugaa

SEQ ID NO: 3387 - RNA, 22 nt, Homo sapiens
agagcuuagcugauuggugaac

SEQ ID NO: 3388 - RNA, 22 nt, Homo sapiens
guucaccaaucagcuaagcucu

SEQ ID NO: 3389 - RNA, 23 nt, Homo sapiens
uguaguguuuccuacuuuaugga

SEQ ID NO: 3390 - RNA, 23 nt, Homo sapiens
uccauaaaguaggaaacacuaca

SEQ ID NO: 3391 - RNA, 21 nt, Homo sapiens
cauaaaguagaaagcacuacu

SEQ ID NO: 3392 - RNA, 21 nt, Homo sapiens
aguagugcuuucuacuuuaug

SEQ ID NO: 3393 - RNA, 22 nt, Homo sapiens
ugaaggucuacugugugccagg

SEQ ID NO: 3394 - RNA, 22 nt, Homo sapiens
ccuggcacacaguagaccuuca

SEQ ID NO: 3395 - RNA, 22 nt, Homo sapiens
uuguacaugguaggcuuucauu

SEQ ID NO: 3396 - RNA, 22 nt, Homo sapiens
aaugaaagccuaccauguacaa

SEQ ID NO: 3397 - RNA, 21 nt, Homo sapiens
cuggauggcuccuccaugucu

SEQ ID NO: 3398 - RNA, 21 nt, Homo sapiens
agacauggaggagccauccag

SEQ ID NO: 3399 - RNA, 23 nt, Homo sapiens
ucuuggaguaggucauugggugg

SEQ ID NO: 3400 - RNA, 23 nt, Homo sapiens
ccacccaaugaccuacuccaaga

SEQ ID NO: 3401 - RNA, 22 nt, Homo sapiens
cucaucugcaaagaaguaagug

SEQ ID NO: 3402 - RNA, 22 nt, Homo sapiens
cacuuacuucuuugcagaugag

SEQ ID NO: 3403 - RNA, 22 nt, Homo sapiens
aacuguuugcagaggaaacuga

SEQ ID NO: 3404 - RNA, 22 nt, Homo sapiens
ucaguuuccucugcaaacaguu

SEQ ID NO: 3405 - RNA, 22 nt, Homo sapiens
cuugguucagggagggucccca

SEQ ID NO: 3406 - RNA, 22 nt, Homo sapiens
uggggacccucccugaaccaag

SEQ ID NO: 3407 - RNA, 22 nt, Homo sapiens
aggaccuucccugaaccaagga

SEQ ID NO: 3408 - RNA, 22 nt, Homo sapiens
uccuugguucagggaagguccu

SEQ ID NO: 3409 - RNA, 21 nt, Homo sapiens
accuccugugugcauggauua

SEQ ID NO: 3410 - RNA, 21 nt, Homo sapiens
uaauccaugcacacaggaggu

SEQ ID NO: 3411 - RNA, 22 nt, Homo sapiens
uacccauugcauaucggaguug

SEQ ID NO: 3412 - RNA, 22 nt, Homo sapiens
caacuccgauaugcaaugggua

SEQ ID NO: 3413 - RNA, 18 nt, Homo sapiens
aaagcuggguugagaagg

SEQ ID NO: 3414 - RNA, 18 nt, Homo sapiens
ccuucucaacccagcuuu

SEQ ID NO: 3415 - RNA, 20 nt, Homo sapiens
gguauccguuuggggauggu

SEQ ID NO: 3416 - RNA, 20 nt, Homo sapiens
accauccccaaacggauacc

SEQ ID NO: 3417 - RNA, 22 nt, Homo sapiens
gaaggcagcagugcuccccugu

SEQ ID NO: 3418 - RNA, 22 nt, Homo sapiens
acaggggagcacugcugccuuc

SEQ ID NO: 3419 - RNA, 22 nt, Homo sapiens
ucagugcaucacagaacuuugu

SEQ ID NO: 3420 - RNA, 22 nt, Homo sapiens
acaaaguucugugaugcacuga

SEQ ID NO: 3421 - RNA, 22 nt, Homo sapiens
aaguucuguuauacacucaggc

SEQ ID NO: 3422 - RNA, 22 nt, Homo sapiens
gccugaguguauaacagaacuu

SEQ ID NO: 3423 - RNA, 22 nt, Homo sapiens
cuggcccucucugcccuuccgu

SEQ ID NO: 3424 - RNA, 22 nt, Homo sapiens
acggaagggcagagagggccag

SEQ ID NO: 3425 - RNA, 21 nt, Homo sapiens
cuagacugaagcuccuugagg

SEQ ID NO: 3426 - RNA, 21 nt, Homo sapiens
ccucaaggagcuucagucuag

SEQ ID NO: 3427 - RNA, 21 nt, Homo sapiens
ucgaggagcucacagucuagu

SEQ ID NO: 3428 - RNA, 21 nt, Homo sapiens
acuagacugugagcuccucga

SEQ ID NO: 3429 - RNA, 21 nt, Homo sapiens
cacauuacacggucgaccucu

SEQ ID NO: 3430 - RNA, 21 nt, Homo sapiens
agaggucgaccguguaaugug

SEQ ID NO: 3431 - RNA, 22 nt, Homo sapiens
aggugguccguggcgcguucgc

SEQ ID NO: 3432 - RNA, 22 nt, Homo sapiens
gcgaacgcgccacggaccaccu

SEQ ID NO: 3433 - RNA, 23 nt, Homo sapiens
cgcauccccuagggcauuggugu

SEQ ID NO: 3434 - RNA, 23 nt, Homo sapiens
acaccaaugcccuaggggaugcg

SEQ ID NO: 3435 - RNA, 20 nt, Homo sapiens
ccucugggcccuuccuccag

SEQ ID NO: 3436 - RNA, 20 nt, Homo sapiens
cuggaggaagggcccagagg

SEQ ID NO: 3437 - RNA, 23 nt, Homo sapiens
ccuaguagguguccaguaagugu

SEQ ID NO: 3438 - RNA, 23 nt, Homo sapiens
acacuuacuggacaccuacuagg

SEQ ID NO: 3439 - RNA, 21 nt, Homo sapiens
acggugcuggauguggccuuu

SEQ ID NO: 3440 - RNA, 21 nt, Homo sapiens
aaaggccacauccagcaccgu

SEQ ID NO: 3441 - RNA, 23 nt, Homo sapiens
ucagcaccaggauauuguuggag

SEQ ID NO: 3442 - RNA, 23 nt, Homo sapiens
cuccaacaauauccuggugcuga

SEQ ID NO: 3443 - RNA, 23 nt, Homo sapiens
ucaacaaaaucacugaugcugga

SEQ ID NO: 3444 - RNA, 23 nt, Homo sapiens
uccagcaucagugauuuuguuga

SEQ ID NO: 3445 - RNA, 22 nt, Homo sapiens
aacaauauccuggugcugagug

SEQ ID NO: 3446 - RNA, 22 nt, Homo sapiens
cacucagcaccaggauauuguu

SEQ ID NO: 3447 - RNA, 23 nt, Homo sapiens
ggcagguucucacccucucuagg

SEQ ID NO: 3448 - RNA, 23 nt, Homo sapiens
ccuagagagggugagaaccugcc

SEQ ID NO: 3449 - RNA, 23 nt, Homo sapiens
gacacgggcgacagcugcggccc

SEQ ID NO: 3450 - RNA, 23 nt, Homo sapiens
gggccgcagcugucgcccguguc

SEQ ID NO: 3451 - RNA, 21 nt, Homo sapiens
auguaugugugcaugugcaug

SEQ ID NO: 3452 - RNA, 21 nt, Homo sapiens
caugcacaugcacacauacau

SEQ ID NO: 3453 - RNA, 22 nt, Homo sapiens
uauacaagggcagacucucucu

SEQ ID NO: 3454 - RNA, 22 nt, Homo sapiens
agagagagucugcccuuguaua

SEQ ID NO: 3455 - RNA, 20 nt, Homo sapiens
ggcggcggcggaggcggggg

SEQ ID NO: 3456 - RNA, 20 nt, Homo sapiens
cccccgccuccgccgccgcc

SEQ ID NO: 3457 - RNA, 22 nt, Homo sapiens
gcaggugcucacuuguccuccu

SEQ ID NO: 3458 - RNA, 22 nt, Homo sapiens
aggaggacaagugagcaccugc

SEQ ID NO: 3459 - RNA, 19 nt, Homo sapiens
ggggccuggcggugggcgg

SEQ ID NO: 3460 - RNA, 19 nt, Homo sapiens
ccgcccaccgccaggcccc

SEQ ID NO: 3461 - RNA, 22 nt, Homo sapiens
gcccaaaggugaauuuuuuggg

SEQ ID NO: 3462 - RNA, 22 nt, Homo sapiens
cccaaaaaauucaccuuugggc

SEQ ID NO: 3463 - RNA, 22 nt, Homo sapiens
caaagaauucuccuuuugggcu

SEQ ID NO: 3464 - RNA, 22 nt, Homo sapiens
agcccaaaaggagaauucuuug

SEQ ID NO: 3465 - RNA, 22 nt, Homo sapiens
cugcaauguaagcacuucuuac

SEQ ID NO: 3466 - RNA, 22 nt, Homo sapiens
guaagaagugcuuacauugcag

SEQ ID NO: 3467 - RNA, 23 nt, Homo sapiens
aaaagugcuuacagugcagguag

SEQ ID NO: 3468 - RNA, 23 nt, Homo sapiens
cuaccugcacuguaagcacuuuu

SEQ ID NO: 3469 - RNA, 22 nt, Homo sapiens
acuguaguaugggcacuuccag

SEQ ID NO: 3470 - RNA, 22 nt, Homo sapiens
cuggaagugcccauacuacagu

SEQ ID NO: 3471 - RNA, 23 nt, Homo sapiens
caaagugcucauagugcagguag

SEQ ID NO: 3472 - RNA, 23 nt, Homo sapiens
cuaccugcacuaugagcacuuug

SEQ ID NO: 3473 - RNA, 23 nt, Homo sapiens
gggguauuguuuccgcugccagg

SEQ ID NO: 3474 - RNA, 23 nt, Homo sapiens
ccuggcagcggaaacaauacccc

SEQ ID NO: 3475 - RNA, 23 nt, Homo sapiens
uagcagcgggaacaguucugcag

SEQ ID NO: 3476 - RNA, 23 nt, Homo sapiens
cugcagaacuguucccgcugcua

SEQ ID NO: 3477 - RNA, 21 nt, Homo sapiens
cgagccucaagcaagggacuu

SEQ ID NO: 3478 - RNA, 21 nt, Homo sapiens
aagucccuugcuugaggcucg

SEQ ID NO: 3479 - RNA, 22 nt, Homo sapiens
uagucccuuccuugaagcgguc

SEQ ID NO: 3480 - RNA, 22 nt, Homo sapiens
gaccgcuucaaggaagggacua

SEQ ID NO: 3481 - RNA, 21 nt, Homo sapiens
acuggacuuggagucagaagg

SEQ ID NO: 3482 - RNA, 21 nt, Homo sapiens
ccuucugacuccaaguccagu

SEQ ID NO: 3483 - RNA, 22 nt, Homo sapiens
cuccugacuccagguccugugu

SEQ ID NO: 3484 - RNA, 22 nt, Homo sapiens
acacaggaccuggagucaggag

SEQ ID NO: 3485 - RNA, 22 nt, Homo sapiens
uuuguucguucggcucgcguga

SEQ ID NO: 3486 - RNA, 22 nt, Homo sapiens
ucacgcgagccgaacgaacaaa

SEQ ID NO: 3487 - RNA, 22 nt, Homo sapiens
acggauguuugagcaugugcua

SEQ ID NO: 3488 - RNA, 22 nt, Homo sapiens
uagcacaugcucaaacauccgu

SEQ ID NO: 3489 - RNA, 23 nt, Homo sapiens
ucaaaugcucagacuccuguggu

SEQ ID NO: 3490 - RNA, 23 nt, Homo sapiens
accacaggagucugagcauuuga

SEQ ID NO: 3491 - RNA, 22 nt, Homo sapiens
cggcaacaagaaacugccugag

SEQ ID NO: 3492 - RNA, 22 nt, Homo sapiens
cucaggcaguuucuuguugccg

SEQ ID NO: 3493 - RNA, 22 nt, Homo sapiens
uagguaguuucauguuguuggg

SEQ ID NO: 3494 - RNA, 22 nt, Homo sapiens
cccaacaacaugaaacuaccua

SEQ ID NO: 3495 - RNA, 22 nt, Homo sapiens
caauguuuccacagugcaucac

SEQ ID NO: 3496 - RNA, 22 nt, Homo sapiens
gugaugcacuguggaaacauug

SEQ ID NO: 3497 - RNA, 21 nt, Homo sapiens
gugcauuguaguugcauugca

SEQ ID NO: 3498 - RNA, 21 nt, Homo sapiens
ugcaaugcaacuacaaugcac

SEQ ID NO: 3499 - RNA, 18 nt, Homo sapiens
aucccaccucugccacca

SEQ ID NO: 3500 - RNA, 18 nt, Homo sapiens
ugguggcagaggugggau

SEQ ID NO: 3501 - RNA, 19 nt, Homo sapiens
aucccaccacugccaccau

SEQ ID NO: 3502 - RNA, 19 nt, Homo sapiens
augguggcaguggugggau

SEQ ID NO: 3503 - RNA, 22 nt, Homo sapiens
accuuccucuccaugggucuuu

SEQ ID NO: 3504 - RNA, 22 nt, Homo sapiens
aaagacccauggagaggaaggu

SEQ ID NO: 3505 - RNA, 22 nt, Homo sapiens
aaagacccauugaggagaaggu

SEQ ID NO: 3506 - RNA, 22 nt, Homo sapiens
accuucuccucaaugggucuuu

SEQ ID NO: 3507 - RNA, 21 nt, Homo sapiens
aauguagagauugaucaaaau

SEQ ID NO: 3508 - RNA, 21 nt, Homo sapiens
auuuugaucaaucucuacauu

SEQ ID NO: 3509 - RNA, 23 nt, Homo sapiens
acggaauauguauacggaauaua

SEQ ID NO: 3510 - RNA, 23 nt, Homo sapiens
uauauuccguauacauauuccgu

SEQ ID NO: 3511 - RNA, 24 nt, Homo sapiens
agagcucacagcuguccuucucua

SEQ ID NO: 3512 - RNA, 24 nt, Homo sapiens
uagagaaggacagcugugagcucu

SEQ ID NO: 3513 - RNA, 22 nt, Homo sapiens
aucaaauaaggacuagucugca

SEQ ID NO: 3514 - RNA, 22 nt, Homo sapiens
ugcagacuaguccuuauuugau

SEQ ID NO: 3515 - RNA, 23 nt, Homo sapiens
augagacucauguaaaacaucuu

SEQ ID NO: 3516 - RNA, 23 nt, Homo sapiens
aagauguuuuacaugagucucau

SEQ ID NO: 3517 - RNA, 21 nt, Homo sapiens
auggaauguauauacggaaua

SEQ ID NO: 3518 - RNA, 21 nt, Homo sapiens
uauuccguauauacauuccau

SEQ ID NO: 3519 - RNA, 22 nt, Homo sapiens
auuguagaaccuaagauuggcc

SEQ ID NO: 3520 - RNA, 22 nt, Homo sapiens
ggccaaucuuagguucuacaau

SEQ ID NO: 3521 - RNA, 22 nt, Homo sapiens
caucucuaaggaacucccccaa

SEQ ID NO: 3522 - RNA, 22 nt, Homo sapiens
uugggggaguuccuuagagaug

SEQ ID NO: 3523 - RNA, 23 nt, Homo sapiens
uauggggcuucuguagagauuuc

SEQ ID NO: 3524 - RNA, 23 nt, Homo sapiens
gaaaucucuacagaagccccaua

SEQ ID NO: 3525 - RNA, 20 nt, Homo sapiens
ccguguuucccccacgcuuu

SEQ ID NO: 3526 - RNA, 20 nt, Homo sapiens
aaagcgugggggaaacacgg

SEQ ID NO: 3527 - RNA, 15 nt, Homo sapiens
aggagauccuggguu

SEQ ID NO: 3528 - RNA, 15 nt, Homo sapiens
aacccaggaucuccu

SEQ ID NO: 3529 - RNA, 22 nt, Homo sapiens
cucgugggcucuggccacggcc

SEQ ID NO: 3530 - RNA, 22 nt, Homo sapiens
ggccguggccagagcccacgag

SEQ ID NO: 3531 - RNA, 22 nt, Homo sapiens
caguggccagagcccugcagug

SEQ ID NO: 3532 - RNA, 22 nt, Homo sapiens
cacugcagggcucuggccacug

SEQ ID NO: 3533 - RNA, 22 nt, Homo sapiens
cugcagaguuuguacggaccgg

SEQ ID NO: 3534 - RNA, 22 nt, Homo sapiens
ccgguccguacaaacucugcag

SEQ ID NO: 3535 - RNA, 20 nt, Homo sapiens
uccguacaaacucugcugug

SEQ ID NO: 3536 - RNA, 20 nt, Homo sapiens
cacagcagaguuuguacgga

SEQ ID NO: 3537 - RNA, 22 nt, Homo sapiens
cuuccccccaguaaucuucauc

SEQ ID NO: 3538 - RNA, 22 nt, Homo sapiens
gaugaagauuacuggggggaag

SEQ ID NO: 3539 - RNA, 23 nt, Homo sapiens
ugaggauauggcagggaagggga

SEQ ID NO: 3540 - RNA, 23 nt, Homo sapiens
uccccuucccugccauauccuca

SEQ ID NO: 3541 - RNA, 23 nt, Homo sapiens
uuuugcaugacccugggaguagg

SEQ ID NO: 3542 - RNA, 23 nt, Homo sapiens
ccuacucccagggucaugcaaaa

SEQ ID NO: 3543 - RNA, 22 nt, Homo sapiens
gacucacucacaggauugugca

SEQ ID NO: 3544 - RNA, 22 nt, Homo sapiens
ugcacaauccugugagugaguc

SEQ ID NO: 3545 - RNA, 22 nt, Homo sapiens
acacagugcuucauccacuacu

SEQ ID NO: 3546 - RNA, 22 nt, Homo sapiens
aguaguggaugaagcacugugu

SEQ ID NO: 3547 - RNA, 22 nt, Homo sapiens
uaguggaugaugcacucugugc

SEQ ID NO: 3548 - RNA, 22 nt, Homo sapiens
gcacagagugcaucauccacua

SEQ ID NO: 3549 - RNA, 21 nt, Homo sapiens
ugaugauacagguggagguag

SEQ ID NO: 3550 - RNA, 21 nt, Homo sapiens
cuaccuccaccuguaucauca

SEQ ID NO: 3551 - RNA, 22 nt, Homo sapiens
cuacuucuaccuguguuaucau

SEQ ID NO: 3552 - RNA, 22 nt, Homo sapiens
augauaacacagguagaaguag

SEQ ID NO: 3553 - RNA, 22 nt, Homo sapiens
ugcgacauuggaaguaguauca

SEQ ID NO: 3554 - RNA, 22 nt, Homo sapiens
ugauacuacuuccaaugucgca

SEQ ID NO: 3555 - RNA, 21 nt, Homo sapiens
uuagaccuaguacacguccuu

SEQ ID NO: 3556 - RNA, 21 nt, Homo sapiens
aaggacguguacuaggucuaa

SEQ ID NO: 3557 - RNA, 22 nt, Homo sapiens
uuuccuacccuaccugaagacu

SEQ ID NO: 3558 - RNA, 22 nt, Homo sapiens
agucuucagguaggguaggaaa

SEQ ID NO: 3559 - RNA, 22 nt, Homo sapiens
aucuguaagagaaaguaaauga

SEQ ID NO: 3560 - RNA, 22 nt, Homo sapiens
ucauuuacuuucucuuacagau

SEQ ID NO: 3561 - RNA, 24 nt, Homo sapiens
cccggacaggcguucgugcgacgu

SEQ ID NO: 3562 - RNA, 24 nt, Homo sapiens
acgucgcacgaacgccuguccggg

SEQ ID NO: 3563 - RNA, 23 nt, Homo sapiens
accuggacccagcguagacaaag

SEQ ID NO: 3564 - RNA, 23 nt, Homo sapiens
cuuugucuacgcuggguccaggu

SEQ ID NO: 3565 - RNA, 22 nt, Homo sapiens
accaagucugcgucauccucuc

SEQ ID NO: 3566 - RNA, 22 nt, Homo sapiens
gagaggaugacgcagacuuggu

SEQ ID NO: 3567 - RNA, 23 nt, Homo sapiens
aguggaugauggagacucgguac

SEQ ID NO: 3568 - RNA, 23 nt, Homo sapiens
guaccgagucuccaucauccacu

SEQ ID NO: 3569 - RNA, 24 nt, Homo sapiens
guuccacacugacacugcagaagu

SEQ ID NO: 3570 - RNA, 24 nt, Homo sapiens
acuucugcagugucaguguggaac

SEQ ID NO: 3571 - RNA, 24 nt, Homo sapiens
ccugcuggucaggaguggauacug

SEQ ID NO: 3572 - RNA, 24 nt, Homo sapiens
caguauccacuccugaccagcagg

SEQ ID NO: 3573 - RNA, 23 nt, Homo sapiens
gagggucuugggagggaugugac

SEQ ID NO: 3574 - RNA, 23 nt, Homo sapiens
gucacaucccucccaagacccuc

SEQ ID NO: 3575 - RNA, 22 nt, Homo sapiens
auauacagggggagacucuuau

SEQ ID NO: 3576 - RNA, 22 nt, Homo sapiens
auaagagucucccccuguauau

SEQ ID NO: 3577 - RNA, 22 nt, Homo sapiens
auauacagggggagacucucau

SEQ ID NO: 3578 - RNA, 22 nt, Homo sapiens
augagagucucccccuguauau

SEQ ID NO: 3579 - RNA, 21 nt, Homo sapiens
agaggauacccuuuguauguu

SEQ ID NO: 3580 - RNA, 21 nt, Homo sapiens
aacauacaaaggguauccucu

SEQ ID NO: 3581 - RNA, 22 nt, Homo sapiens
ucuacaaaggaaagcgcuuucu

SEQ ID NO: 3582 - RNA, 22 nt, Homo sapiens
agaaagcgcuuuccuuuguaga

SEQ ID NO: 3583 - RNA, 22 nt, Homo sapiens
ucaaaacugaggggcauuuucu

SEQ ID NO: 3584 - RNA, 22 nt, Homo sapiens
agaaaaugccccucaguuuuga

SEQ ID NO: 3585 - RNA, 24 nt, Homo sapiens
uucuccaaaagaaagcacuuucug

SEQ ID NO: 3586 - RNA, 24 nt, Homo sapiens
cagaaagugcuuucuuuuggagaa

SEQ ID NO: 3587 - RNA, 23 nt, Homo sapiens
uucucgaggaaagaagcacuuuc

SEQ ID NO: 3588 - RNA, 23 nt, Homo sapiens
gaaagugcuucuuuccucgagaa

SEQ ID NO: 3589 - RNA, 22 nt, Homo sapiens
ccucuagauggaagcacugucu

SEQ ID NO: 3590 - RNA, 22 nt, Homo sapiens
agacagugcuuccaucuagagg

SEQ ID NO: 3591 - RNA, 22 nt, Homo sapiens
aucgugcaucccuuuagagugu

SEQ ID NO: 3592 - RNA, 22 nt, Homo sapiens
acacucuaaagggaugcacgau

SEQ ID NO: 3593 - RNA, 22 nt, Homo sapiens
aucgugcaucccuuuagagugu

SEQ ID NO: 3594 - RNA, 22 nt, Homo sapiens
acacucuaaagggaugcacgau

SEQ ID NO: 3595 - RNA, 22 nt, Homo sapiens
aucgugcauccuuuuagagugu

SEQ ID NO: 3596 - RNA, 22 nt, Homo sapiens
acacucuaaaaggaugcacgau

SEQ ID NO: 3597 - RNA, 22 nt, Homo sapiens
caaagcgcuccccuuuagaggu

SEQ ID NO: 3598 - RNA, 22 nt, Homo sapiens
accucuaaaggggagcgcuuug

SEQ ID NO: 3599 - RNA, 23 nt, Homo sapiens
caaagcgcuucucuuuagagugu

SEQ ID NO: 3600 - RNA, 23 nt, Homo sapiens
acacucuaaagagaagcgcuuug

SEQ ID NO: 3601 - RNA, 23 nt, Homo sapiens
ucucuggagggaagcacuuucug

SEQ ID NO: 3602 - RNA, 23 nt, Homo sapiens
cagaaagugcuucccuccagaga

SEQ ID NO: 3603 - RNA, 21 nt, Homo sapiens
gaaagcgcuucucuuuagagg

SEQ ID NO: 3604 - RNA, 21 nt, Homo sapiens
ccucuaaagagaagcgcuuuc

SEQ ID NO: 3605 - RNA, 22 nt, Homo sapiens
cucuagagggaagcacuuucuc

SEQ ID NO: 3606 - RNA, 22 nt, Homo sapiens
gagaaagugcuucccucuagag

SEQ ID NO: 3607 - RNA, 22 nt, Homo sapiens
aaagugcauccuuuuagagugu

SEQ ID NO: 3608 - RNA, 22 nt, Homo sapiens
acacucuaaaaggaugcacuuu

SEQ ID NO: 3609 - RNA, 22 nt, Homo sapiens
cucuagagggaagcgcuuucug

SEQ ID NO: 3610 - RNA, 22 nt, Homo sapiens
cagaaagcgcuucccucuagag

SEQ ID NO: 3611 - RNA, 22 nt, Homo sapiens
caaagugccucccuuuagagug

SEQ ID NO: 3612 - RNA, 22 nt, Homo sapiens
cacucuaaagggaggcacuuug

SEQ ID NO: 3613 - RNA, 22 nt, Homo sapiens
aagugccuccuuuuagaguguu

SEQ ID NO: 3614 - RNA, 22 nt, Homo sapiens
aacacucuaaaaggaggcacuu

SEQ ID NO: 3615 - RNA, 22 nt, Homo sapiens
uucuccaaaagggagcacuuuc

SEQ ID NO: 3616 - RNA, 22 nt, Homo sapiens
gaaagugcucccuuuuggagaa

SEQ ID NO: 3617 - RNA, 22 nt, Homo sapiens
aaagugcuucccuuuggacugu

SEQ ID NO: 3618 - RNA, 22 nt, Homo sapiens
acaguccaaagggaagcacuuu

SEQ ID NO: 3619 - RNA, 21 nt, Homo sapiens
cuccagagggaaguacuuucu

SEQ ID NO: 3620 - RNA, 21 nt, Homo sapiens
agaaaguacuucccucuggag

SEQ ID NO: 3621 - RNA, 22 nt, Homo sapiens
acaaagugcuucccuuuagagu

SEQ ID NO: 3622 - RNA, 22 nt, Homo sapiens
acucuaaagggaagcacuuugu

SEQ ID NO: 3623 - RNA, 22 nt, Homo sapiens
cuacaaagggaagcacuuucuc

SEQ ID NO: 3624 - RNA, 22 nt, Homo sapiens
gagaaagugcuucccuuuguag

SEQ ID NO: 3625 - RNA, 22 nt, Homo sapiens
gaaggcgcuucccuuuagagcg

SEQ ID NO: 3626 - RNA, 22 nt, Homo sapiens
cgcucuaaagggaagcgccuuc

SEQ ID NO: 3627 - RNA, 21 nt, Homo sapiens
cuccagagggaugcacuuucu

SEQ ID NO: 3628 - RNA, 21 nt, Homo sapiens
agaaagugcaucccucuggag

SEQ ID NO: 3629 - RNA, 22 nt, Homo sapiens
cucuagagggaagcacuuucug

SEQ ID NO: 3630 - RNA, 22 nt, Homo sapiens
cagaaagugcuucccucuagag

SEQ ID NO: 3631 - RNA, 22 nt, Homo sapiens
gaaagugcuuccuuuuagaggc

SEQ ID NO: 3632 - RNA, 22 nt, Homo sapiens
gccucuaaaaggaagcacuuuc

SEQ ID NO: 3633 - RNA, 23 nt, Homo sapiens
cucuugagggaagcacuuucugu

SEQ ID NO: 3634 - RNA, 23 nt, Homo sapiens
acagaaagugcuucccucaagag

SEQ ID NO: 3635 - RNA, 22 nt, Homo sapiens
acuggacuuagggucagaaggc

SEQ ID NO: 3636 - RNA, 22 nt, Homo sapiens
gccuucugacccuaaguccagu

SEQ ID NO: 3637 - RNA, 22 nt, Homo sapiens
aaacaaacauggugcacuucuu

SEQ ID NO: 3638 - RNA, 22 nt, Homo sapiens
aagaagugcaccauguuuguuu

SEQ ID NO: 3639 - RNA, 22 nt, Homo sapiens
gaaguugcccauguuauuuucg

SEQ ID NO: 3640 - RNA, 22 nt, Homo sapiens
cgaaaauaacaugggcaacuuc

SEQ ID NO: 3641 - RNA, 21 nt, Homo sapiens
aaucauucacggacaacacuu

SEQ ID NO: 3642 - RNA, 21 nt, Homo sapiens
aaguguuguccgugaaugauu

SEQ ID NO: 3643 - RNA, 22 nt, Homo sapiens
gaaguuguucgugguggauucg

SEQ ID NO: 3644 - RNA, 22 nt, Homo sapiens
cgaauccaccacgaacaacuuc

SEQ ID NO: 3645 - RNA, 23 nt, Homo sapiens
ccuccguguuaccuguccucuag

SEQ ID NO: 3646 - RNA, 23 nt, Homo sapiens
cuagaggacagguaacacggagg

SEQ ID NO: 3647 - RNA, 23 nt, Homo sapiens
ugaggauggauagcaaggaagcc

SEQ ID NO: 3648 - RNA, 23 nt, Homo sapiens
ggcuuccuugcuauccauccuca

SEQ ID NO: 3649 - RNA, 22 nt, Homo sapiens
uucagaucccagcggugccucu

SEQ ID NO: 3650 - RNA, 22 nt, Homo sapiens
agaggcaccgcugggaucugaa

SEQ ID NO: 3651 - RNA, 19 nt, Homo sapiens
guccuaggaggcuccucug

SEQ ID NO: 3652 - RNA, 19 nt, Homo sapiens
cagaggagccuccuaggac

SEQ ID NO: 3653 - RNA, 21 nt, Homo sapiens
caauucucaaaggagccuccc

SEQ ID NO: 3654 - RNA, 21 nt, Homo sapiens
gggaggcuccuuugagaauug

SEQ ID NO: 3655 - RNA, 21 nt, Homo sapiens
guuggggugcaggggucugcu

SEQ ID NO: 3656 - RNA, 21 nt, Homo sapiens
agcagaccccugcaccccaac

SEQ ID NO: 3657 - RNA, 22 nt, Homo sapiens
uuuccggcucgcgugggugugu

SEQ ID NO: 3658 - RNA, 22 nt, Homo sapiens
acacacccacgcgagccggaaa

SEQ ID NO: 3659 - RNA, 23 nt, Homo sapiens
ugagugugugugugugagugugu

SEQ ID NO: 3660 - RNA, 23 nt, Homo sapiens
acacacucacacacacacacuca

SEQ ID NO: 3661 - RNA, 22 nt, Homo sapiens
agugggaggccagggcacggca

SEQ ID NO: 3662 - RNA, 22 nt, Homo sapiens
ugccgugcccuggccucccacu

SEQ ID NO: 3663 - RNA, 20 nt, Homo sapiens
ugagcccuguccucccgcag

SEQ ID NO: 3664 - RNA, 20 nt, Homo sapiens
cugcgggaggacagggcuca

SEQ ID NO: 3665 - RNA, 23 nt, Homo sapiens
aagugccgccaucuuuugagugu

SEQ ID NO: 3666 - RNA, 23 nt, Homo sapiens
acacucaaaagauggcggcacuu

SEQ ID NO: 3667 - RNA, 20 nt, Homo sapiens
acucaaacugugggggcacu

SEQ ID NO: 3668 - RNA, 20 nt, Homo sapiens
agugcccccacaguuugagu

SEQ ID NO: 3669 - RNA, 23 nt, Homo sapiens
aagugcccccacaguuugagugc

SEQ ID NO: 3670 - RNA, 23 nt, Homo sapiens
gcacucaaacugugggggcacuu

SEQ ID NO: 3671 - RNA, 22 nt, Homo sapiens
acucaaaagauggcggcacuuu

SEQ ID NO: 3672 - RNA, 22 nt, Homo sapiens
aaagugccgccaucuuuugagu

SEQ ID NO: 3673 - RNA, 22 nt, Homo sapiens
aaaccuguguuguucaagaguc

SEQ ID NO: 3674 - RNA, 22 nt, Homo sapiens
gacucuugaacaacacagguuu

SEQ ID NO: 3675 - RNA, 22 nt, Homo sapiens
acaguagagggaggaaucgcag

SEQ ID NO: 3676 - RNA, 22 nt, Homo sapiens
cugcgauuccucccucuacugu

SEQ ID NO: 3677 - RNA, 22 nt, Homo sapiens
gugaaauguuuaggaccacuag

SEQ ID NO: 3678 - RNA, 22 nt, Homo sapiens
cuagugguccuaaacauuucac

SEQ ID NO: 3679 - RNA, 23 nt, Homo sapiens
uugaacuguuaagaaccacugga

SEQ ID NO: 3680 - RNA, 23 nt, Homo sapiens
uccagugguucuuaacaguucaa

SEQ ID NO: 3681 - RNA, 22 nt, Homo sapiens
uagugguccuaaacauuucaca

SEQ ID NO: 3682 - RNA, 22 nt, Homo sapiens
ugugaaauguuuaggaccacua

SEQ ID NO: 3683 - RNA, 21 nt, Homo sapiens
ugcaggaccaagaugagcccu

SEQ ID NO: 3684 - RNA, 21 nt, Homo sapiens
agggcucaucuugguccugca

SEQ ID NO: 3685 - RNA, 21 nt, Homo sapiens
cucccacaugcaggguuugca

SEQ ID NO: 3686 - RNA, 21 nt, Homo sapiens
ugcaaacccugcaugugggag

SEQ ID NO: 3687 - RNA, 21 nt, Homo sapiens
caucccuugcaugguggaggg

SEQ ID NO: 3688 - RNA, 21 nt, Homo sapiens
cccuccaccaugcaagggaug

SEQ ID NO: 3689 - RNA, 22 nt, Homo sapiens
aaaaugaaaugagcccagccca

SEQ ID NO: 3690 - RNA, 22 nt, Homo sapiens
ugggcugggcucauuucauuuu

SEQ ID NO: 3691 - RNA, 21 nt, Homo sapiens
agccgcggggaucgccgaggg

SEQ ID NO: 3692 - RNA, 21 nt, Homo sapiens
cccucggcgauccccgcggcu

SEQ ID NO: 3693 - RNA, 19 nt, Homo sapiens
agggaccugagugucuaag

SEQ ID NO: 3694 - RNA, 19 nt, Homo sapiens
cuuagacacucaggucccu

SEQ ID NO: 3695 - RNA, 19 nt, Homo sapiens
aggugugucuguagagucc

SEQ ID NO: 3696 - RNA, 19 nt, Homo sapiens
ggacucuacagacacaccu

SEQ ID NO: 3697 - RNA, 24 nt, Homo sapiens
cauagcccggucgcugguacauga

SEQ ID NO: 3698 - RNA, 24 nt, Homo sapiens
ucauguaccagcgaccgggcuaug

SEQ ID NO: 3699 - RNA, 18 nt, Homo sapiens
cggcuggaggugugagga

SEQ ID NO: 3700 - RNA, 18 nt, Homo sapiens
uccucacaccuccagccg

SEQ ID NO: 3701 - RNA, 18 nt, Homo sapiens
cuaagaaguugacugaag

SEQ ID NO: 3702 - RNA, 18 nt, Homo sapiens
cuucagucaacuucuuag

SEQ ID NO: 3703 - RNA, 19 nt, Homo sapiens
gacuggacaagcugaggaa

SEQ ID NO: 3704 - RNA, 19 nt, Homo sapiens
uuccucagcuuguccaguc

SEQ ID NO: 3705 - RNA, 21 nt, Homo sapiens
gcuugucgcugcgguguugcu

SEQ ID NO: 3706 - RNA, 21 nt, Homo sapiens
agcaacaccgcagcgacaagc

SEQ ID NO: 3707 - RNA, 17 nt, Homo sapiens
ggcgggugcgggggugg

SEQ ID NO: 3708 - RNA, 17 nt, Homo sapiens
ccacccccgcacccgcc

SEQ ID NO: 3709 - RNA, 21 nt, Homo sapiens
ugugucccauuauuggugauu

SEQ ID NO: 3710 - RNA, 21 nt, Homo sapiens
aaucaccaauaaugggacaca

SEQ ID NO: 3711 - RNA, 22 nt, Homo sapiens
uuuaagaaaacaccauggagau

SEQ ID NO: 3712 - RNA, 22 nt, Homo sapiens
aucuccaugguguuuucuuaaa

SEQ ID NO: 3713 - RNA, 22 nt, Homo sapiens
gcuauuucacgacaccaggguu

SEQ ID NO: 3714 - RNA, 22 nt, Homo sapiens
aacccuggugucgugaaauagc

SEQ ID NO: 3715 - RNA, 23 nt, Homo sapiens
agcugguguugugaaucaggccg

SEQ ID NO: 3716 - RNA, 23 nt, Homo sapiens
cggccugauucacaacaccagcu

SEQ ID NO: 3717 - RNA, 21 nt, Homo sapiens
aauaauacaugguugaucuuu

SEQ ID NO: 3718 - RNA, 21 nt, Homo sapiens
aaagaucaaccauguauuauu

SEQ ID NO: 3719 - RNA, 22 nt, Homo sapiens
agaucgaccguguuauauucgc

SEQ ID NO: 3720 - RNA, 22 nt, Homo sapiens
gcgaauauaacacggucgaucu

SEQ ID NO: 3721 - RNA, 22 nt, Homo sapiens
aaucaugugcagugccaauaug

SEQ ID NO: 3722 - RNA, 22 nt, Homo sapiens
cauauuggcacugcacaugauu

SEQ ID NO: 3723 - RNA, 23 nt, Homo sapiens
uuuggcacuagcacauuuuugcu

SEQ ID NO: 3724 - RNA, 23 nt, Homo sapiens
agcaaaaaugugcuagugccaaa

SEQ ID NO: 3725 - RNA, 22 nt, Homo sapiens
uccuguacugagcugccccgag

SEQ ID NO: 3726 - RNA, 22 nt, Homo sapiens
cucggggcagcucaguacagga

SEQ ID NO: 3727 - RNA, 22 nt, Homo sapiens
gcuacuucacaacaccagggcc

SEQ ID NO: 3728 - RNA, 22 nt, Homo sapiens
ggcccugguguugugaaguagc

SEQ ID NO: 3729 - RNA, 22 nt, Homo sapiens
caucaucgucucaaaugagucu

SEQ ID NO: 3730 - RNA, 22 nt, Homo sapiens
agacucauuugagacgaugaug

SEQ ID NO: 3731 - RNA, 23 nt, Homo sapiens
acuccauuuguuuugaugaugga

SEQ ID NO: 3732 - RNA, 23 nt, Homo sapiens
uccaucaucaaaacaaauggagu

SEQ ID NO: 3733 - RNA, 22 nt, Homo sapiens
cuccuacauauuagcauuaaca

SEQ ID NO: 3734 - RNA, 22 nt, Homo sapiens
uguuaaugcuaauauguaggag

SEQ ID NO: 3735 - RNA, 23 nt, Homo sapiens
uuaaugcuaaucgugauaggggu

SEQ ID NO: 3736 - RNA, 23 nt, Homo sapiens
accccuaucacgauuagcauuaa

SEQ ID NO: 3737 - RNA, 22 nt, Homo sapiens
agaucagaaggugauuguggcu

SEQ ID NO: 3738 - RNA, 22 nt, Homo sapiens
agccacaaucaccuucugaucu

SEQ ID NO: 3739 - RNA, 22 nt, Homo sapiens
uacugcagacguggcaaucaug

SEQ ID NO: 3740 - RNA, 22 nt, Homo sapiens
caugauugccacgucugcagua

SEQ ID NO: 3741 - RNA, 21 nt, Homo sapiens
guuagggccaacaucucuugg

SEQ ID NO: 3742 - RNA, 21 nt, Homo sapiens
ccaagagauguuggcccuaac

SEQ ID NO: 3743 - RNA, 21 nt, Homo sapiens
aacauagaggaaauuccacgu

SEQ ID NO: 3744 - RNA, 21 nt, Homo sapiens
acguggaauuuccucuauguu

SEQ ID NO: 3745 - RNA, 21 nt, Homo sapiens
gguggauauuccuucuauguu

SEQ ID NO: 3746 - RNA, 21 nt, Homo sapiens
aacauagaaggaauauccacc

SEQ ID NO: 3747 - RNA, 23 nt, Homo sapiens
ucauagcccuguacaaugcugcu

SEQ ID NO: 3748 - RNA, 23 nt, Homo sapiens
agcagcauuguacagggcuauga

SEQ ID NO: 3749 - RNA, 22 nt, Homo sapiens
uaacacugucugguaaagaugg

SEQ ID NO: 3750 - RNA, 22 nt, Homo sapiens
ccaucuuuaccagacaguguua

SEQ ID NO: 3751 - RNA, 22 nt, Homo sapiens
caucuuccaguacaguguugga

SEQ ID NO: 3752 - RNA, 22 nt, Homo sapiens
uccaacacuguacuggaagaug

SEQ ID NO: 3753 - RNA, 22 nt, Homo sapiens
aacuggccuacaaagucccagu

SEQ ID NO: 3754 - RNA, 22 nt, Homo sapiens
acugggacuuuguaggccaguu

SEQ ID NO: 3755 - RNA, 22 nt, Homo sapiens
ugggucuuugcgggcgagauga

SEQ ID NO: 3756 - RNA, 22 nt, Homo sapiens
ucaucucgcccgcaaagaccca

SEQ ID NO: 3757 - RNA, 21 nt, Homo sapiens
augaccuaugaauugacagac

SEQ ID NO: 3758 - RNA, 21 nt, Homo sapiens
gucugucaauucauaggucau

SEQ ID NO: 3759 - RNA, 22 nt, Homo sapiens
aagcugccaguugaagaacugu

SEQ ID NO: 3760 - RNA, 22 nt, Homo sapiens
acaguucuucaacuggcagcuu

SEQ ID NO: 3761 - RNA, 22 nt, Homo sapiens
aguucuucaguggcaagcuuua

SEQ ID NO: 3762 - RNA, 22 nt, Homo sapiens
uaaagcuugccacugaagaacu

SEQ ID NO: 3763 - RNA, 22 nt, Homo sapiens
acagauucgauucuaggggaau

SEQ ID NO: 3764 - RNA, 22 nt, Homo sapiens
auuccccuagaaucgaaucugu

SEQ ID NO: 3765 - RNA, 23 nt, Homo sapiens
uacccuguagaaccgaauuugug

SEQ ID NO: 3766 - RNA, 23 nt, Homo sapiens
cacaaauucgguucuacagggua

SEQ ID NO: 3767 - RNA, 22 nt, Homo sapiens
uagcagcacguaaauauuggcg

SEQ ID NO: 3768 - RNA, 22 nt, Homo sapiens
cgccaauauuuacgugcugcua

SEQ ID NO: 3769 - RNA, 21 nt, Homo sapiens
ugagaugaagcacuguagcuc

SEQ ID NO: 3770 - RNA, 21 nt, Homo sapiens
gagcuacagugcuucaucuca

SEQ ID NO: 3771 - RNA, 22 nt, Homo sapiens
ggugcagugcugcaucucuggu

SEQ ID NO: 3772 - RNA, 22 nt, Homo sapiens
accagagaugcagcacugcacc

SEQ ID NO: 3773 - RNA, 21 nt, Homo sapiens
uugcucacuguucuucccuag

SEQ ID NO: 3774 - RNA, 21 nt, Homo sapiens
cuagggaagaacagugagcaa

SEQ ID NO: 3775 - RNA, 18 nt, Homo sapiens
cagggucagcugagcaug

SEQ ID NO: 3776 - RNA, 18 nt, Homo sapiens
caugcucagcugacccug

SEQ ID NO: 3777 - RNA, 21 nt, Homo sapiens
aagcauucuuucauugguugg

SEQ ID NO: 3778 - RNA, 21 nt, Homo sapiens
ccaaccaaugaaagaaugcuu

SEQ ID NO: 3779 - RNA, 21 nt, Homo sapiens
ccgucgccgccacccgagccg

SEQ ID NO: 3780 - RNA, 21 nt, Homo sapiens
cggcucggguggcggcgacgg

SEQ ID NO: 3781 - RNA, 27 nt, Homo sapiens
cacuguaggugauggugagagugggca

SEQ ID NO: 3782 - RNA, 27 nt, Homo sapiens
ugcccacucucaccaucaccuacagug

SEQ ID NO: 3783 - RNA, 23 nt, Homo sapiens
gggaugguagaccggugacgugc

SEQ ID NO: 3784 - RNA, 23 nt, Homo sapiens
gcacgucaccggucuaccauccc

SEQ ID NO: 3785 - RNA, 21 nt, Homo sapiens
uaggacacauggucuacuucu

SEQ ID NO: 3786 - RNA, 21 nt, Homo sapiens
agaaguagaccauguguccua

SEQ ID NO: 3787 - RNA, 22 nt, Homo sapiens
cuccugagccauucugagccuc

SEQ ID NO: 3788 - RNA, 22 nt, Homo sapiens
gaggcucagaauggcucaggag

SEQ ID NO: 3789 - RNA, 21 nt, Homo sapiens
gugccagcugcagugggggag

SEQ ID NO: 3790 - RNA, 21 nt, Homo sapiens
cucccccacugcagcuggcac

SEQ ID NO: 3791 - RNA, 21 nt, Homo sapiens
cccggagccaggaugcagcuc

SEQ ID NO: 3792 - RNA, 21 nt, Homo sapiens
gagcugcauccuggcuccggg

SEQ ID NO: 3793 - RNA, 21 nt, Homo sapiens
ucguggccuggucuccauuau

SEQ ID NO: 3794 - RNA, 21 nt, Homo sapiens
auaauggagaccaggccacga

SEQ ID NO: 3795 - RNA, 20 nt, Homo sapiens
ucugcaggguuugcuuugag

SEQ ID NO: 3796 - RNA, 20 nt, Homo sapiens
cucaaagcaaacccugcaga

SEQ ID NO: 3797 - RNA, 21 nt, Homo sapiens
uguucauguagauguuuaagc

SEQ ID NO: 3798 - RNA, 21 nt, Homo sapiens
gcuuaaacaucuacaugaaca

SEQ ID NO: 3799 - RNA, 18 nt, Homo sapiens
ucagcuggcccucauuuc

SEQ ID NO: 3800 - RNA, 18 nt, Homo sapiens
gaaaugagggccagcuga

SEQ ID NO: 3801 - RNA, 21 nt, Homo sapiens
uggcagggaggcugggagggg

SEQ ID NO: 3802 - RNA, 21 nt, Homo sapiens
ccccucccagccucccugcca

SEQ ID NO: 3803 - RNA, 20 nt, Homo sapiens
ucacuguucagacaggcgga

SEQ ID NO: 3804 - RNA, 20 nt, Homo sapiens
uccgccugucugaacaguga

SEQ ID NO: 3805 - RNA, 21 nt, Homo sapiens
ccccaccuccucucuccucag

SEQ ID NO: 3806 - RNA, 21 nt, Homo sapiens
cugaggagagaggaggugggg

SEQ ID NO: 3807 - RNA, 19 nt, Homo sapiens
gugaggacucgggaggugg

SEQ ID NO: 3808 - RNA, 19 nt, Homo sapiens
ccaccucccgaguccucac

SEQ ID NO: 3809 - RNA, 22 nt, Homo sapiens
ugagccccugugccgcccccag

SEQ ID NO: 3810 - RNA, 22 nt, Homo sapiens
cugggggcggcacaggggcuca

SEQ ID NO: 3811 - RNA, 22 nt, Homo sapiens
guggguacggcccagugggggg

SEQ ID NO: 3812 - RNA, 22 nt, Homo sapiens
ccccccacugggccguacccac

SEQ ID NO: 3813 - RNA, 22 nt, Homo sapiens
ucaccagcccuguguucccuag

SEQ ID NO: 3814 - RNA, 22 nt, Homo sapiens
cuagggaacacagggcugguga

SEQ ID NO: 3815 - RNA, 26 nt, Homo sapiens
gugagggcaugcaggccuggaugggg

SEQ ID NO: 3816 - RNA, 26 nt, Homo sapiens
ccccauccaggccugcaugcccucac

SEQ ID NO: 3817 - RNA, 23 nt, Homo sapiens
cucucaccacugcccucccacag

SEQ ID NO: 3818 - RNA, 23 nt, Homo sapiens
cugugggagggcaguggugagag

SEQ ID NO: 3819 - RNA, 24 nt, Homo sapiens
guggguaggguuugggggagagcg

SEQ ID NO: 3820 - RNA, 24 nt, Homo sapiens
cgcucucccccaaacccuacccac

SEQ ID NO: 3821 - RNA, 20 nt, Homo sapiens
gugucugggcggacagcugc

SEQ ID NO: 3822 - RNA, 20 nt, Homo sapiens
gcagcuguccgcccagacac

SEQ ID NO: 3823 - RNA, 20 nt, Homo sapiens
cuuccucgucugucugcccc

SEQ ID NO: 3824 - RNA, 20 nt, Homo sapiens
ggggcagacagacgaggaag

SEQ ID NO: 3825 - RNA, 23 nt, Homo sapiens
gugagugggagccccagugugug

SEQ ID NO: 3826 - RNA, 23 nt, Homo sapiens
cacacacuggggcucccacucac

SEQ ID NO: 3827 - RNA, 27 nt, Homo sapiens
accuucuuguauaagcacugugcuaaa

SEQ ID NO: 3828 - RNA, 27 nt, Homo sapiens
uuuagcacagugcuuauacaagaaggu

SEQ ID NO: 3829 - RNA, 22 nt, Homo sapiens
ggcgacaaaacgagacccuguc

SEQ ID NO: 3830 - RNA, 22 nt, Homo sapiens
gacagggucucguuuugucgcc

SEQ ID NO: 3831 - RNA, 22 nt, Homo sapiens
uugcuugaacccaggaagugga

SEQ ID NO: 3832 - RNA, 22 nt, Homo sapiens
uccacuuccuggguucaagcaa

SEQ ID NO: 3833 - RNA, 19 nt, Homo sapiens
ggagauggagguugcagug

SEQ ID NO: 3834 - RNA, 19 nt, Homo sapiens
cacugcaaccuccaucucc

SEQ ID NO: 3835 - RNA, 21 nt, Homo sapiens
accacugcacuccagccugag

SEQ ID NO: 3836 - RNA, 21 nt, Homo sapiens
cucaggcuggagugcaguggu

SEQ ID NO: 3837 - RNA, 22 nt, Homo sapiens
ggugguugaggcugcaguaagu

SEQ ID NO: 3838 - RNA, 22 nt, Homo sapiens
acuuacugcagccucaaccacc

SEQ ID NO: 3839 - RNA, 17 nt, Homo sapiens
ucgccuccuccucuccc

SEQ ID NO: 3840 - RNA, 17 nt, Homo sapiens
gggagaggaggaggcga

SEQ ID NO: 3841 - RNA, 22 nt, Homo sapiens
ucuauacagacccuggcuuuuc

SEQ ID NO: 3842 - RNA, 22 nt, Homo sapiens
gaaaagccagggucuguauaga

SEQ ID NO: 3843 - RNA, 22 nt, Homo sapiens
ucugggcaacaaagugagaccu

SEQ ID NO: 3844 - RNA, 22 nt, Homo sapiens
aggucucacuuuguugcccaga

SEQ ID NO: 3845 - RNA, 21 nt, Homo sapiens
gaucucacuuuguugcccagg

SEQ ID NO: 3846 - RNA, 21 nt, Homo sapiens
ccugggcaacaaagugagauc

SEQ ID NO: 3847 - RNA, 20 nt, Homo sapiens
ucgcgccccggcucccguuc

SEQ ID NO: 3848 - RNA, 20 nt, Homo sapiens
gaacgggagccggggcgcga

SEQ ID NO: 3849 - RNA, 25 nt, Homo sapiens
ugggaacggguuccggcagacgcug

SEQ ID NO: 3850 - RNA, 25 nt, Homo sapiens
cagcgucugccggaacccguuccca

SEQ ID NO: 3851 - RNA, 21 nt, Homo sapiens
uuaggccgcagaucuggguga

SEQ ID NO: 3852 - RNA, 21 nt, Homo sapiens
ucacccagaucugcggccuaa

SEQ ID NO: 3853 - RNA, 22 nt, Homo sapiens
aauaggccacggaucugggcaa

SEQ ID NO: 3854 - RNA, 22 nt, Homo sapiens
uugcccagauccguggccuauu

SEQ ID NO: 3855 - RNA, 21 nt, Homo sapiens
cacccagaucugcggccuaau

SEQ ID NO: 3856 - RNA, 21 nt, Homo sapiens
auuaggccgcagaucugggug

SEQ ID NO: 3857 - RNA, 22 nt, Homo sapiens
uuagggcccuggcuccaucucc

SEQ ID NO: 3858 - RNA, 22 nt, Homo sapiens
ggagauggagccagggcccuaa

SEQ ID NO: 3859 - RNA, 22 nt, Homo sapiens
uucauucggcuguccagaugua

SEQ ID NO: 3860 - RNA, 22 nt, Homo sapiens
uacaucuggacagccgaaugaa

SEQ ID NO: 3861 - RNA, 24 nt, Homo sapiens
uugcagcugccugggagugacuuc

SEQ ID NO: 3862 - RNA, 24 nt, Homo sapiens
gaagucacucccaggcagcugcaa

SEQ ID NO: 3863 - RNA, 21 nt, Homo sapiens
uugggacauacuuaugcuaaa

SEQ ID NO: 3864 - RNA, 21 nt, Homo sapiens
uuuagcauaaguaugucccaa

SEQ ID NO: 3865 - RNA, 22 nt, Homo sapiens
ucucacuguagccucgaacccc

SEQ ID NO: 3866 - RNA, 22 nt, Homo sapiens
gggguucgaggcuacagugaga

SEQ ID NO: 3867 - RNA, 22 nt, Homo sapiens
uuugaggcuacagugagaugug

SEQ ID NO: 3868 - RNA, 22 nt, Homo sapiens
cacaucucacuguagccucaaa

SEQ ID NO: 3869 - RNA, 18 nt, Homo sapiens
cagggaggugaaugugau

SEQ ID NO: 3870 - RNA, 18 nt, Homo sapiens
aucacauucaccucccug

SEQ ID NO: 3871 - RNA, 19 nt, Homo sapiens
gaugaugcugcugaugcug

SEQ ID NO: 3872 - RNA, 19 nt, Homo sapiens
cagcaucagcagcaucauc

SEQ ID NO: 3873 - RNA, 24 nt, Homo sapiens
ccagacagaauucuaugcacuuuc

SEQ ID NO: 3874 - RNA, 24 nt, Homo sapiens
gaaagugcauagaauucugucugg

SEQ ID NO: 3875 - RNA, 22 nt, Homo sapiens
cuccuggggcccgcacucucgc

SEQ ID NO: 3876 - RNA, 22 nt, Homo sapiens
gcgagagugcgggccccaggag

SEQ ID NO: 3877 - RNA, 21 nt, Homo sapiens
cuccguuugccuguuucgcug

SEQ ID NO: 3878 - RNA, 21 nt, Homo sapiens
cagcgaaacaggcaaacggag

SEQ ID NO: 3879 - RNA, 22 nt, Homo sapiens
cucggcgcggggcgcgggcucc

SEQ ID NO: 3880 - RNA, 22 nt, Homo sapiens
ggagcccgcgccccgcgccgag

SEQ ID NO: 3881 - RNA, 21 nt, Homo sapiens
gcccuccgcccgugcaccccg

SEQ ID NO: 3882 - RNA, 21 nt, Homo sapiens
cggggugcacgggcggagggc

SEQ ID NO: 3883 - RNA, 22 nt, Homo sapiens
gcccgcguguggagccaggugu

SEQ ID NO: 3884 - RNA, 22 nt, Homo sapiens
acaccuggcuccacacgcgggc

SEQ ID NO: 3885 - RNA, 22 nt, Homo sapiens
aaaaccgucuaguuacaguugu

SEQ ID NO: 3886 - RNA, 22 nt, Homo sapiens
acaacuguaacuagacgguuuu

SEQ ID NO: 3887 - RNA, 18 nt, Homo sapiens
uccagugcccuccucucc

SEQ ID NO: 3888 - RNA, 18 nt, Homo sapiens
ggagaggagggcacugga

SEQ ID NO: 3889 - RNA, 18 nt, Homo sapiens
ugaggcaguagauugaau

SEQ ID NO: 3890 - RNA, 18 nt, Homo sapiens
auucaaucuacugccuca

SEQ ID NO: 3891 - RNA, 22 nt, Homo sapiens
aggggcuggcuuuccucugguc

SEQ ID NO: 3892 - RNA, 22 nt, Homo sapiens
gaccagaggaaagccagccccu

SEQ ID NO: 3893 - RNA, 22 nt, Homo sapiens
uggagagaaaggcaguuccuga

SEQ ID NO: 3894 - RNA, 22 nt, Homo sapiens
ucaggaacugccuuucucucca

SEQ ID NO: 3895 - RNA, 22 nt, Homo sapiens
ucgugucuuguguugcagccgg

SEQ ID NO: 3896 - RNA, 22 nt, Homo sapiens
ccggcugcaacacaagacacga

SEQ ID NO: 3897 - RNA, 22 nt, Homo sapiens
ggcuacaacacaggacccgggc

SEQ ID NO: 3898 - RNA, 22 nt, Homo sapiens
gcccggguccuguguuguagcc

SEQ ID NO: 3899 - RNA, 21 nt, Homo sapiens
cggcggggacggcgauugguc

SEQ ID NO: 3900 - RNA, 21 nt, Homo sapiens
gaccaaucgccguccccgccg

SEQ ID NO: 3901 - RNA, 22 nt, Homo sapiens
cgcaggggccgggugcucaccg

SEQ ID NO: 3902 - RNA, 22 nt, Homo sapiens
cggugagcacccggccccugcg

SEQ ID NO: 3903 - RNA, 21 nt, Homo sapiens
ugagugccggugccugcccug

SEQ ID NO: 3904 - RNA, 21 nt, Homo sapiens
cagggcaggcaccggcacuca

SEQ ID NO: 3905 - RNA, 22 nt, Homo sapiens
gcugcgcuuggauuucgucccc

SEQ ID NO: 3906 - RNA, 22 nt, Homo sapiens
ggggacgaaauccaagcgcagc

SEQ ID NO: 3907 - RNA, 23 nt, Homo sapiens
caacggaaucccaaaagcagcug

SEQ ID NO: 3908 - RNA, 23 nt, Homo sapiens
cagcugcuuuugggauuccguug

SEQ ID NO: 3909 - RNA, 22 nt, Homo sapiens
ucaggccaggcacaguggcuca

SEQ ID NO: 3910 - RNA, 22 nt, Homo sapiens
ugagccacugugccuggccuga

SEQ ID NO: 3911 - RNA, 19 nt, Homo sapiens
accgugcaaagguagcaua

SEQ ID NO: 3912 - RNA, 19 nt, Homo sapiens
uaugcuaccuuugcacggu

SEQ ID NO: 3913 - RNA, 20 nt, Homo sapiens
ccuccugcccuccuugcugu

SEQ ID NO: 3914 - RNA, 20 nt, Homo sapiens
acagcaaggagggcaggagg

SEQ ID NO: 3915 - RNA, 20 nt, Homo sapiens
uguuuugauaacaguaaugu

SEQ ID NO: 3916 - RNA, 20 nt, Homo sapiens
acauuacuguuaucaaaaca

SEQ ID NO: 3917 - RNA, 23 nt, Homo sapiens
guguuaauuaaaccucuauuuac

SEQ ID NO: 3918 - RNA, 23 nt, Homo sapiens
guaaauagagguuuaauuaacac

SEQ ID NO: 3919 - RNA, 23 nt, Homo sapiens
cuguaauauaaauuuaauuuauu

SEQ ID NO: 3920 - RNA, 23 nt, Homo sapiens
aauaaauuaaauuuauauuacag

SEQ ID NO: 3921 - RNA, 22 nt, Homo sapiens
uuggggaaacggccgcugagug

SEQ ID NO: 3922 - RNA, 22 nt, Homo sapiens
cacucagcggccguuuccccaa

SEQ ID NO: 3923 - RNA, 21 nt, Homo sapiens
ccucccaugccaagaacuccc

SEQ ID NO: 3924 - RNA, 21 nt, Homo sapiens
gggaguucuuggcaugggagg

SEQ ID NO: 3925 - RNA, 21 nt, Homo sapiens
gguucuuagcauaggaggucu

SEQ ID NO: 3926 - RNA, 21 nt, Homo sapiens
agaccuccuaugcuaagaacc

SEQ ID NO: 3927 - RNA, 21 nt, Homo sapiens
uguucucuuugccaaggacag

SEQ ID NO: 3928 - RNA, 21 nt, Homo sapiens
cuguccuuggcaaagagaaca

SEQ ID NO: 3929 - RNA, 22 nt, Homo sapiens
aaaucucugcaggcaaauguga

SEQ ID NO: 3930 - RNA, 22 nt, Homo sapiens
ucacauuugccugcagagauuu

SEQ ID NO: 3931 - RNA, 22 nt, Homo sapiens
caugguucugucaagcaccgcg

SEQ ID NO: 3932 - RNA, 22 nt, Homo sapiens
cgcggugcuugacagaaccaug

SEQ ID NO: 3933 - RNA, 21 nt, Homo sapiens
uugugcuugaucuaaccaugu

SEQ ID NO: 3934 - RNA, 21 nt, Homo sapiens
acaugguuagaucaagcacaa

SEQ ID NO: 3935 - RNA, 22 nt, Homo sapiens
ucugcaagugucagaggcgagg

SEQ ID NO: 3936 - RNA, 22 nt, Homo sapiens
ccucgccucugacacuugcaga

SEQ ID NO: 3937 - RNA, 22 nt, Homo sapiens
gagagcaguguguguugccugg

SEQ ID NO: 3938 - RNA, 22 nt, Homo sapiens
ccaggcaacacacacugcucuc

SEQ ID NO: 3939 - RNA, 22 nt, Homo sapiens
aucacauugccagugauuaccc

SEQ ID NO: 3940 - RNA, 22 nt, Homo sapiens
ggguaaucacuggcaaugugau

SEQ ID NO: 3941 - RNA, 22 nt, Homo sapiens
agcagaggcagagaggcucagg

SEQ ID NO: 3942 - RNA, 22 nt, Homo sapiens
ccugagccucucugccucugcu

SEQ ID NO: 3943 - RNA, 23 nt, Homo sapiens
ugaggcucuguuagccuuggcuc

SEQ ID NO: 3944 - RNA, 23 nt, Homo sapiens
gagccaaggcuaacagagccuca

SEQ ID NO: 3945 - RNA, 22 nt, Homo sapiens
uaucauggaguugguaaagcac

SEQ ID NO: 3946 - RNA, 22 nt, Homo sapiens
gugcuuuaccaacuccaugaua

SEQ ID NO: 3947 - RNA, 22 nt, Homo sapiens
guuuuaccaccuccaggagacu

SEQ ID NO: 3948 - RNA, 22 nt, Homo sapiens
agucuccuggaggugguaaaac

SEQ ID NO: 3949 - RNA, 22 nt, Homo sapiens
cgccucuucagcgcugucuucc

SEQ ID NO: 3950 - RNA, 22 nt, Homo sapiens
ggaagacagcgcugaagaggcg

SEQ ID NO: 3951 - RNA, 23 nt, Homo sapiens
caggcagugacuguucagacguc

SEQ ID NO: 3952 - RNA, 23 nt, Homo sapiens
gacgucugaacagucacugccug

SEQ ID NO: 3953 - RNA, 23 nt, Homo sapiens
agaauugcguuuggacaaucagu

SEQ ID NO: 3954 - RNA, 23 nt, Homo sapiens
acugauuguccaaacgcaauucu

SEQ ID NO: 3955 - RNA, 22 nt, Homo sapiens
agauguccagccacaauucucg

SEQ ID NO: 3956 - RNA, 22 nt, Homo sapiens
cgagaauuguggcuggacaucu

SEQ ID NO: 3957 - RNA, 24 nt, Homo sapiens
agcagaagcagggagguucuccca

SEQ ID NO: 3958 - RNA, 24 nt, Homo sapiens
ugggagaaccucccugcuucugcu

SEQ ID NO: 3959 - RNA, 22 nt, Homo sapiens
uaugugggaugguaaaccgcuu

SEQ ID NO: 3960 - RNA, 22 nt, Homo sapiens
aagcgguuuaccaucccacaua

SEQ ID NO: 3961 - RNA, 22 nt, Homo sapiens
ugguuuaccgucccacauacau

SEQ ID NO: 3962 - RNA, 22 nt, Homo sapiens
auguaugugggacgguaaacca

SEQ ID NO: 3963 - RNA, 23 nt, Homo sapiens
cagugcaaugauauugucaaagc

SEQ ID NO: 3964 - RNA, 23 nt, Homo sapiens
gcuuugacaauaucauugcacug

SEQ ID NO: 3965 - RNA, 17 nt, Homo sapiens
uaauugcuuccauguuu

SEQ ID NO: 3966 - RNA, 17 nt, Homo sapiens
aaacauggaagcaauua

SEQ ID NO: 3967 - RNA, 23 nt, Homo sapiens
uugccacacugcaacaccuuaca

SEQ ID NO: 3968 - RNA, 23 nt, Homo sapiens
uguaagguguugcaguguggcaa

SEQ ID NO: 3969 - RNA, 21 nt, Homo sapiens
ucuggcuguuguggugugcaa

SEQ ID NO: 3970 - RNA, 21 nt, Homo sapiens
uugcacaccacaacagccaga

SEQ ID NO: 3971 - RNA, 22 nt, Homo sapiens
gauaucagcucaguaggcaccg

SEQ ID NO: 3972 - RNA, 22 nt, Homo sapiens
cggugccuacugagcugauauc

SEQ ID NO: 3973 - RNA, 21 nt, Homo sapiens
guuccugcugaacugagccag

SEQ ID NO: 3974 - RNA, 21 nt, Homo sapiens
cuggcucaguucagcaggaac

SEQ ID NO: 3975 - RNA, 20 nt, Homo sapiens
auauggguuuacuaguuggu

SEQ ID NO: 3976 - RNA, 20 nt, Homo sapiens
accaacuaguaaacccauau

SEQ ID NO: 3977 - RNA, 22 nt, Homo sapiens
ugcuaugccaacauauugccau

SEQ ID NO: 3978 - RNA, 22 nt, Homo sapiens
auggcaauauguuggcauagca

SEQ ID NO: 3979 - RNA, 21 nt, Homo sapiens
aggcaagaugcuggcauagcu

SEQ ID NO: 3980 - RNA, 21 nt, Homo sapiens
agcuaugccagcaucuugccu

SEQ ID NO: 3981 - RNA, 18 nt, Homo sapiens
cggggcggcaggggccuc

SEQ ID NO: 3982 - RNA, 18 nt, Homo sapiens
gaggccccugccgccccg

SEQ ID NO: 3983 - RNA, 19 nt, Homo sapiens
aaaagcuggguugagagga

SEQ ID NO: 3984 - RNA, 19 nt, Homo sapiens
uccucucaacccagcuuuu

SEQ ID NO: 3985 - RNA, 22 nt, Homo sapiens
cccaauacacggucgaccucuu

SEQ ID NO: 3986 - RNA, 22 nt, Homo sapiens
aagaggucgaccguguauuggg

SEQ ID NO: 3987 - RNA, 23 nt, Homo sapiens
agguuguccguggugaguucgca

SEQ ID NO: 3988 - RNA, 23 nt, Homo sapiens
ugcgaacucaccacggacaaccu

SEQ ID NO: 3989 - RNA, 23 nt, Homo sapiens
gcaaagcacacggccugcagaga

SEQ ID NO: 3990 - RNA, 23 nt, Homo sapiens
ucucugcaggccgugugcuuugc

SEQ ID NO: 3991 - RNA, 22 nt, Homo sapiens
ucucugggccugugucuuaggc

SEQ ID NO: 3992 - RNA, 22 nt, Homo sapiens
gccuaagacacaggcccagaga

SEQ ID NO: 3993 - RNA, 21 nt, Homo sapiens
gccccugggccuauccuagaa

SEQ ID NO: 3994 - RNA, 21 nt, Homo sapiens
uucuaggauaggcccaggggc

SEQ ID NO: 3995 - RNA, 22 nt, Homo sapiens
uccgucucaguuacuuuauagc

SEQ ID NO: 3996 - RNA, 22 nt, Homo sapiens
gcuauaaaguaacugagacgga

SEQ ID NO: 3997 - RNA, 22 nt, Homo sapiens
aacacaccuauucaaggauuca

SEQ ID NO: 3998 - RNA, 22 nt, Homo sapiens
ugaauccuugaauagguguguu

SEQ ID NO: 3999 - RNA, 24 nt, Homo sapiens
aauccuuggaaccuaggugugagu

SEQ ID NO: 4000 - RNA, 24 nt, Homo sapiens
acucacaccuagguuccaaggauu

SEQ ID NO: 4001 - RNA, 22 nt, Homo sapiens
uaaugccccuaaaaauccuuau

SEQ ID NO: 4002 - RNA, 22 nt, Homo sapiens
auaaggauuuuuaggggcauua

SEQ ID NO: 4003 - RNA, 23 nt, Homo sapiens
agggacuuuugggggcagaugug

SEQ ID NO: 4004 - RNA, 23 nt, Homo sapiens
cacaucugcccccaaaagucccu

SEQ ID NO: 4005 - RNA, 22 nt, Homo sapiens
uaaugccccuaaaaauccuuau

SEQ ID NO: 4006 - RNA, 22 nt, Homo sapiens
auaaggauuuuuaggggcauua

SEQ ID NO: 4007 - RNA, 22 nt, Homo sapiens
agggacuuucaggggcagcugu

SEQ ID NO: 4008 - RNA, 22 nt, Homo sapiens
acagcugccccugaaagucccu

SEQ ID NO: 4009 - RNA, 24 nt, Homo sapiens
gaaaaugaugaguagugacugaug

SEQ ID NO: 4010 - RNA, 24 nt, Homo sapiens
caucagucacuacucaucauuuuc

SEQ ID NO: 4011 - RNA, 23 nt, Homo sapiens
ugagcaccacacaggccgggcgc

SEQ ID NO: 4012 - RNA, 23 nt, Homo sapiens
gcgcccggccuguguggugcuca

SEQ ID NO: 4013 - RNA, 21 nt, Homo sapiens
gcuggucugcguggugcucgg

SEQ ID NO: 4014 - RNA, 21 nt, Homo sapiens
ccgagcaccacgcagaccagc

SEQ ID NO: 4015 - RNA, 22 nt, Homo sapiens
gccugcugggguggaaccuggu

SEQ ID NO: 4016 - RNA, 22 nt, Homo sapiens
accagguuccaccccagcaggc

SEQ ID NO: 4017 - RNA, 23 nt, Homo sapiens
gaagugcuucgauuuuggggugu

SEQ ID NO: 4018 - RNA, 23 nt, Homo sapiens
acaccccaaaaucgaagcacuuc

SEQ ID NO: 4019 - RNA, 22 nt, Homo sapiens
acucaaaaugggggcgcuuucc

SEQ ID NO: 4020 - RNA, 22 nt, Homo sapiens
ggaaagcgcccccauuuugagu

SEQ ID NO: 4021 - RNA, 22 nt, Homo sapiens
uauguaacaugguccacuaacu

SEQ ID NO: 4022 - RNA, 22 nt, Homo sapiens
aguuaguggaccauguuacaua

SEQ ID NO: 4023 - RNA, 21 nt, Homo sapiens
ugguagacuauggaacguagg

SEQ ID NO: 4024 - RNA, 21 nt, Homo sapiens
ccuacguuccauagucuacca

SEQ ID NO: 4025 - RNA, 22 nt, Homo sapiens
uguagauacgagcaccagccac

SEQ ID NO: 4026 - RNA, 22 nt, Homo sapiens
guggcuggugcucguaucuaca

SEQ ID NO: 4027 - RNA, 23 nt, Homo sapiens
acaggcggcuguagcaauggggg

SEQ ID NO: 4028 - RNA, 23 nt, Homo sapiens
cccccauugcuacagccgccugu

SEQ ID NO: 4029 - RNA, 22 nt, Homo sapiens
aauucccuuguagauaacccgg

SEQ ID NO: 4030 - RNA, 22 nt, Homo sapiens
ccggguuaucuacaagggaauu

SEQ ID NO: 4031 - RNA, 22 nt, Homo sapiens
uacgcgcagaccacaggauguc

SEQ ID NO: 4032 - RNA, 22 nt, Homo sapiens
gacauccuguggucugcgcgua

SEQ ID NO: 4033 - RNA, 22 nt, Homo sapiens
uuacacacaacugaggaucaua

SEQ ID NO: 4034 - RNA, 22 nt, Homo sapiens
uaugauccucaguuguguguaa

SEQ ID NO: 4035 - RNA, 23 nt, Homo sapiens
uagcccccaggcuucacuuggcg

SEQ ID NO: 4036 - RNA, 23 nt, Homo sapiens
cgccaagugaagccugggggcua

SEQ ID NO: 4037 - RNA, 23 nt, Homo sapiens
agggcauaggagaggguugauau

SEQ ID NO: 4038 - RNA, 23 nt, Homo sapiens
auaucaacccucuccuaugcccu

SEQ ID NO: 4039 - RNA, 22 nt, Homo sapiens
gaauguugcucggugaaccccu

SEQ ID NO: 4040 - RNA, 22 nt, Homo sapiens
agggguucaccgagcaacauuc

SEQ ID NO: 4041 - RNA, 23 nt, Homo sapiens
agguuacccgagcaacuuugcau

SEQ ID NO: 4042 - RNA, 23 nt, Homo sapiens
augcaaaguugcucggguaaccu

SEQ ID NO: 4043 - RNA, 22 nt, Homo sapiens
uauguaacacgguccacuaacc

SEQ ID NO: 4044 - RNA, 22 nt, Homo sapiens
gguuaguggaccguguuacaua

SEQ ID NO: 4045 - RNA, 21 nt, Homo sapiens
uaguagaccguauagcguacg

SEQ ID NO: 4046 - RNA, 21 nt, Homo sapiens
cguacgcuauacggucuacua

SEQ ID NO: 4047 - RNA, 23 nt, Homo sapiens
acuucaccugguccacuagccgu

SEQ ID NO: 4048 - RNA, 23 nt, Homo sapiens
acggcuaguggaccaggugaagu

SEQ ID NO: 4049 - RNA, 18 nt, Homo sapiens
guguucucugauggacag

SEQ ID NO: 4050 - RNA, 18 nt, Homo sapiens
cuguccaucagagaacac

SEQ ID NO: 4051 - RNA, 22 nt, Homo sapiens
caggucgucuugcagggcuucu

SEQ ID NO: 4052 - RNA, 22 nt, Homo sapiens
agaagcccugcaagacgaccug

SEQ ID NO: 4053 - RNA, 21 nt, Homo sapiens
ugucuugcaggccgucaugca

SEQ ID NO: 4054 - RNA, 21 nt, Homo sapiens
ugcaugacggccugcaagaca

SEQ ID NO: 4055 - RNA, 22 nt, Homo sapiens
aucaugaugggcuccucggugu

SEQ ID NO: 4056 - RNA, 22 nt, Homo sapiens
acaccgaggagcccaucaugau

SEQ ID NO: 4057 - RNA, 23 nt, Homo sapiens
uugcuaguugcacuccucucugu

SEQ ID NO: 4058 - RNA, 23 nt, Homo sapiens
acagagaggagugcaacuagcaa

SEQ ID NO: 4059 - RNA, 25 nt, Homo sapiens
uaggcaguguauugcuagcggcugu

SEQ ID NO: 4060 - RNA, 25 nt, Homo sapiens
acagccgcuagcaauacacugccua

SEQ ID NO: 4061 - RNA, 22 nt, Homo sapiens
auuggggacauuuugcauucau

SEQ ID NO: 4062 - RNA, 22 nt, Homo sapiens
augaaugcaaaauguccccaau

SEQ ID NO: 4063 - RNA, 22 nt, Homo sapiens
uuuugcgauguguuccuaauau

SEQ ID NO: 4064 - RNA, 22 nt, Homo sapiens
auauuaggaacacaucgcaaaa

SEQ ID NO: 4065 - RNA, 22 nt, Homo sapiens
uugggaucauuuugcauccaua

SEQ ID NO: 4066 - RNA, 22 nt, Homo sapiens
uauggaugcaaaaugaucccaa

SEQ ID NO: 4067 - RNA, 22 nt, Homo sapiens
uuuugcaauauguuccugaaua

SEQ ID NO: 4068 - RNA, 22 nt, Homo sapiens
uauucaggaacauauugcaaaa

SEQ ID NO: 4069 - RNA, 21 nt, Homo sapiens
gcaguccaugggcauauacac

SEQ ID NO: 4070 - RNA, 21 nt, Homo sapiens
guguauaugcccauggacugc

SEQ ID NO: 4071 - RNA, 22 nt, Homo sapiens
uaugugccuuuggacuacaucg

SEQ ID NO: 4072 - RNA, 22 nt, Homo sapiens
cgauguaguccaaaggcacaua

SEQ ID NO: 4073 - RNA, 23 nt, Homo sapiens
auacacauacacgcaacacacau

SEQ ID NO: 4074 - RNA, 23 nt, Homo sapiens
auguguguugcguguauguguau

SEQ ID NO: 4075 - RNA, 23 nt, Homo sapiens
uugcaugucagauuguaauuccc

SEQ ID NO: 4076 - RNA, 23 nt, Homo sapiens
gggaauuacaaucugacaugcaa

SEQ ID NO: 4077 - RNA, 21 nt, Homo sapiens
ucacuccucuccucccgucuu

SEQ ID NO: 4078 - RNA, 21 nt, Homo sapiens
aagacgggaggagaggaguga

SEQ ID NO: 4079 - RNA, 22 nt, Homo sapiens
ucaggcucaguccccucccgau

SEQ ID NO: 4080 - RNA, 22 nt, Homo sapiens
aucgggaggggacugagccuga

SEQ ID NO: 4081 - RNA, 22 nt, Homo sapiens
gucauacacggcucuccucucu

SEQ ID NO: 4082 - RNA, 22 nt, Homo sapiens
agagaggagagccguguaugac

SEQ ID NO: 4083 - RNA, 22 nt, Homo sapiens
agaggcuggccgugaugaauuc

SEQ ID NO: 4084 - RNA, 22 nt, Homo sapiens
gaauucaucacggccagccucu

SEQ ID NO: 4085 - RNA, 22 nt, Homo sapiens
aaucauacagggacauccaguu

SEQ ID NO: 4086 - RNA, 22 nt, Homo sapiens
aacuggaugucccuguaugauu

SEQ ID NO: 4087 - RNA, 22 nt, Homo sapiens
aaucguacagggucauccacuu

SEQ ID NO: 4088 - RNA, 22 nt, Homo sapiens
aaguggaugacccuguacgauu

SEQ ID NO: 4089 - RNA, 21 nt, Homo sapiens
uugaaaggcuauuucuugguc

SEQ ID NO: 4090 - RNA, 21 nt, Homo sapiens
gaccaagaaauagccuuucaa

SEQ ID NO: 4091 - RNA, 21 nt, Homo sapiens
cccagauaauggcacucucaa

SEQ ID NO: 4092 - RNA, 21 nt, Homo sapiens
uugagagugccauuaucuggg

SEQ ID NO: 4093 - RNA, 22 nt, Homo sapiens
caaccuggaggacuccaugcug

SEQ ID NO: 4094 - RNA, 22 nt, Homo sapiens
cagcauggaguccuccagguug

SEQ ID NO: 4095 - RNA, 20 nt, Homo sapiens
ccauggaucuccaggugggu

SEQ ID NO: 4096 - RNA, 20 nt, Homo sapiens
acccaccuggagauccaugg

SEQ ID NO: 4097 - RNA, 22 nt, Homo sapiens
cuuaugcaagauucccuucuac

SEQ ID NO: 4098 - RNA, 22 nt, Homo sapiens
guagaagggaaucuugcauaag

SEQ ID NO: 4099 - RNA, 22 nt, Homo sapiens
aguggggaacccuuccaugagg

SEQ ID NO: 4100 - RNA, 22 nt, Homo sapiens
ccucauggaaggguuccccacu

SEQ ID NO: 4101 - RNA, 23 nt, Homo sapiens
aggaccugcgggacaagauucuu

SEQ ID NO: 4102 - RNA, 23 nt, Homo sapiens
aagaaucuugucccgcagguccu

SEQ ID NO: 4103 - RNA, 22 nt, Homo sapiens
caaaccacacugugguguuaga

SEQ ID NO: 4104 - RNA, 22 nt, Homo sapiens
ucuaacaccacagugugguuug

SEQ ID NO: 4105 - RNA, 21 nt, Homo sapiens
cagcagcacacugugguuugu

SEQ ID NO: 4106 - RNA, 21 nt, Homo sapiens
acaaaccacagugugcugcug

SEQ ID NO: 4107 - RNA, 23 nt, Homo sapiens
uuucaagccagggggcguuuuuc

SEQ ID NO: 4108 - RNA, 23 nt, Homo sapiens
gaaaaacgcccccuggcuugaaa

SEQ ID NO: 4109 - RNA, 20 nt, Homo sapiens
ucacuaccugacaauacagu

SEQ ID NO: 4110 - RNA, 20 nt, Homo sapiens
acuguauugucagguaguga

SEQ ID NO: 4111 - RNA, 21 nt, Homo sapiens
ugcuguauugucagguaguga

SEQ ID NO: 4112 - RNA, 21 nt, Homo sapiens
ucacuaccugacaauacagca

SEQ ID NO: 4113 - RNA, 22 nt, Homo sapiens
uucugccucuguccagguccuu

SEQ ID NO: 4114 - RNA, 22 nt, Homo sapiens
aaggaccuggacagaggcagaa

SEQ ID NO: 4115 - RNA, 24 nt, Homo sapiens
agggcuggacucagcggcggagcu

SEQ ID NO: 4116 - RNA, 24 nt, Homo sapiens
agcuccgccgcugaguccagcccu

SEQ ID NO: 4117 - RNA, 21 nt, Homo sapiens
ugacugccucacugaccacuu

SEQ ID NO: 4118 - RNA, 21 nt, Homo sapiens
aaguggucagugaggcaguca

SEQ ID NO: 4119 - RNA, 24 nt, Homo sapiens
aauuugguuucugaggcacuuagu

SEQ ID NO: 4120 - RNA, 24 nt, Homo sapiens
acuaagugccucagaaaccaaauu

SEQ ID NO: 4121 - RNA, 21 nt, Homo sapiens
uacuuuucuagguuguugggg

SEQ ID NO: 4122 - RNA, 21 nt, Homo sapiens
ccccaacaaccuagaaaagua

SEQ ID NO: 4123 - RNA, 23 nt, Homo sapiens
ucacaacaaccuugcaggguaga

SEQ ID NO: 4124 - RNA, 23 nt, Homo sapiens
ucuacccugcaagguuguuguga

SEQ ID NO: 4125 - RNA, 22 nt, Homo sapiens
cuuggauuuuccugggccucag

SEQ ID NO: 4126 - RNA, 22 nt, Homo sapiens
cugaggcccaggaaaauccaag

SEQ ID NO: 4127 - RNA, 22 nt, Homo sapiens
ugaggacagggcaaauucacga

SEQ ID NO: 4128 - RNA, 22 nt, Homo sapiens
ucgugaauuugcccuguccuca

SEQ ID NO: 4129 - RNA, 22 nt, Homo sapiens
aucauaugaaccaaacucuaau

SEQ ID NO: 4130 - RNA, 22 nt, Homo sapiens
auuagaguuugguucauaugau

SEQ ID NO: 4131 - RNA, 22 nt, Homo sapiens
uagagucuggcugauaugguuu

SEQ ID NO: 4132 - RNA, 22 nt, Homo sapiens
aaaccauaucagccagacucua

SEQ ID NO: 4133 - RNA, 21 nt, Homo sapiens
ccugugcucccagggccucgc

SEQ ID NO: 4134 - RNA, 21 nt, Homo sapiens
gcgaggcccugggagcacagg

SEQ ID NO: 4135 - RNA, 22 nt, Homo sapiens
ugaggcccuuggggcacagugg

SEQ ID NO: 4136 - RNA, 22 nt, Homo sapiens
ccacugugccccaagggccuca

SEQ ID NO: 4137 - RNA, 22 nt, Homo sapiens
uccuaaaucugaaaguccaaaa

SEQ ID NO: 4138 - RNA, 22 nt, Homo sapiens
uuuuggacuuucagauuuagga

SEQ ID NO: 4139 - RNA, 24 nt, Homo sapiens
uuggacuuuuucagauuuggggau

SEQ ID NO: 4140 - RNA, 24 nt, Homo sapiens
auccccaaaucugaaaaaguccaa

SEQ ID NO: 4141 - RNA, 22 nt, Homo sapiens
augcaccugggcaaggauucug

SEQ ID NO: 4142 - RNA, 22 nt, Homo sapiens
cagaauccuugcccaggugcau

SEQ ID NO: 4143 - RNA, 23 nt, Homo sapiens
uaauccuugcuaccugggugaga

SEQ ID NO: 4144 - RNA, 23 nt, Homo sapiens
ucucacccagguagcaaggauua

SEQ ID NO: 4145 - RNA, 22 nt, Homo sapiens
uuuugugucucccauuccccag

SEQ ID NO: 4146 - RNA, 22 nt, Homo sapiens
cuggggaaugggagacacaaaa

SEQ ID NO: 4147 - RNA, 22 nt, Homo sapiens
agggggauggcagagcaaaauu

SEQ ID NO: 4148 - RNA, 22 nt, Homo sapiens
aauuuugcucugccaucccccu

SEQ ID NO: 4149 - RNA, 22 nt, Homo sapiens
gugcauggcuguauauauaaca

SEQ ID NO: 4150 - RNA, 22 nt, Homo sapiens
uguuauauauacagccaugcac

SEQ ID NO: 4151 - RNA, 21 nt, Homo sapiens
uauauauacagccaugcacuc

SEQ ID NO: 4152 - RNA, 21 nt, Homo sapiens
gagugcauggcuguauauaua

SEQ ID NO: 4153 - RNA, 22 nt, Homo sapiens
aaugcacccgggcaaggauucu

SEQ ID NO: 4154 - RNA, 22 nt, Homo sapiens
agaauccuugcccgggugcauu

SEQ ID NO: 4155 - RNA, 22 nt, Homo sapiens
aauccuuugucccugggugaga

SEQ ID NO: 4156 - RNA, 22 nt, Homo sapiens
ucucacccagggacaaaggauu

SEQ ID NO: 4157 - RNA, 22 nt, Homo sapiens
aaugcaccugggcaaggauuca

SEQ ID NO: 4158 - RNA, 22 nt, Homo sapiens
ugaauccuugcccaggugcauu

SEQ ID NO: 4159 - RNA, 21 nt, Homo sapiens
auccuugcuaucugggugcua

SEQ ID NO: 4160 - RNA, 21 nt, Homo sapiens
uagcacccagauagcaaggau

SEQ ID NO: 4161 - RNA, 22 nt, Homo sapiens
agacccuggucugcacucuauc

SEQ ID NO: 4162 - RNA, 22 nt, Homo sapiens
gauagagugcagaccagggucu

SEQ ID NO: 4163 - RNA, 21 nt, Homo sapiens
uugcagcugcgguuguaaggu

SEQ ID NO: 4164 - RNA, 21 nt, Homo sapiens
accuuacaaccgcagcugcaa

SEQ ID NO: 4165 - RNA, 22 nt, Homo sapiens
cgucaacacuugcugguuuccu

SEQ ID NO: 4166 - RNA, 22 nt, Homo sapiens
aggaaaccagcaaguguugacg

SEQ ID NO: 4167 - RNA, 22 nt, Homo sapiens
gggagccaggaaguauugaugu

SEQ ID NO: 4168 - RNA, 22 nt, Homo sapiens
acaucaauacuuccuggcuccc

SEQ ID NO: 4169 - RNA, 21 nt, Homo sapiens
uaaggcacccuucugaguaga

SEQ ID NO: 4170 - RNA, 21 nt, Homo sapiens
ucuacucagaagggugccuua

SEQ ID NO: 4171 - RNA, 22 nt, Homo sapiens
uauucaggaagguguuacuuaa

SEQ ID NO: 4172 - RNA, 22 nt, Homo sapiens
uuaaguaacaccuuccugaaua

SEQ ID NO: 4173 - RNA, 21 nt, Homo sapiens
uuuugcaccuuuuggagugaa

SEQ ID NO: 4174 - RNA, 21 nt, Homo sapiens
uucacuccaaaaggugcaaaa

SEQ ID NO: 4175 - RNA, 23 nt, Homo sapiens
ugauuguagccuuuuggaguaga

SEQ ID NO: 4176 - RNA, 23 nt, Homo sapiens
ucuacuccaaaaggcuacaauca

SEQ ID NO: 4177 - RNA, 23 nt, Homo sapiens
ggguuuguagcuuugcuggcaug

SEQ ID NO: 4178 - RNA, 23 nt, Homo sapiens
caugccagcaaagcuacaaaccc

SEQ ID NO: 4179 - RNA, 23 nt, Homo sapiens
cagggcucagggauuggauggag

SEQ ID NO: 4180 - RNA, 23 nt, Homo sapiens
cuccauccaaucccugagcccug

SEQ ID NO: 4181 - RNA, 23 nt, Homo sapiens
augcuacucggaaaucccacuga

SEQ ID NO: 4182 - RNA, 23 nt, Homo sapiens
ucagugggauuuccgaguagcau

SEQ ID NO: 4183 - RNA, 21 nt, Homo sapiens
gugggauuucugaguagcauc

SEQ ID NO: 4184 - RNA, 21 nt, Homo sapiens
gaugcuacucagaaaucccac

SEQ ID NO: 4185 - RNA, 23 nt, Homo sapiens
ccggggcagauugguguagggug

SEQ ID NO: 4186 - RNA, 23 nt, Homo sapiens
cacccuacaccaaucugccccgg

SEQ ID NO: 4187 - RNA, 23 nt, Homo sapiens
acggagacgacaagacugugcug

SEQ ID NO: 4188 - RNA, 23 nt, Homo sapiens
cagcacagucuugucgucuccgu

SEQ ID NO: 4189 - RNA, 22 nt, Homo sapiens
aauccacgcugagcuuggcauc

SEQ ID NO: 4190 - RNA, 22 nt, Homo sapiens
gaugccaagcucagcguggauu

SEQ ID NO: 4191 - RNA, 23 nt, Homo sapiens
aggaaaugaggcuggcuaggagc

SEQ ID NO: 4192 - RNA, 23 nt, Homo sapiens
gcuccuagccagccucauuuccu

SEQ ID NO: 4193 - RNA, 22 nt, Homo sapiens
ugauugguacgucuguggguag

SEQ ID NO: 4194 - RNA, 22 nt, Homo sapiens
cuacccacagacguaccaauca

SEQ ID NO: 4195 - RNA, 22 nt, Homo sapiens
aaucagugaaugccuugaaccu

SEQ ID NO: 4196 - RNA, 22 nt, Homo sapiens
agguucaaggcauucacugauu

SEQ ID NO: 4197 - RNA, 21 nt, Homo sapiens
uuacaggcgugaaccaccgcg

SEQ ID NO: 4198 - RNA, 21 nt, Homo sapiens
cgcggugguucacgccuguaa

SEQ ID NO: 4199 - RNA, 21 nt, Homo sapiens
uacugcagacaguggcaauca

SEQ ID NO: 4200 - RNA, 21 nt, Homo sapiens
ugauugccacugucugcagua

SEQ ID NO: 4201 - RNA, 21 nt, Homo sapiens
guuucaccauguuggucaggc

SEQ ID NO: 4202 - RNA, 21 nt, Homo sapiens
gccugaccaacauggugaaac

SEQ ID NO: 4203 - RNA, 23 nt, Homo sapiens
uaaauuucaccuuucugagaagg

SEQ ID NO: 4204 - RNA, 23 nt, Homo sapiens
ccuucucagaaaggugaaauuua

SEQ ID NO: 4205 - RNA, 22 nt, Homo sapiens
uucacaaggaggugucauuuau

SEQ ID NO: 4206 - RNA, 22 nt, Homo sapiens
auaaaugacaccuccuugugaa

SEQ ID NO: 4207 - RNA, 23 nt, Homo sapiens
uaaauuucaccuuucugagaaga

SEQ ID NO: 4208 - RNA, 23 nt, Homo sapiens
ucuucucagaaaggugaaauuua

SEQ ID NO: 4209 - RNA, 22 nt, Homo sapiens
uucucaaggaggugucguuuau

SEQ ID NO: 4210 - RNA, 22 nt, Homo sapiens
auaaacgacaccuccuugagaa

SEQ ID NO: 4211 - RNA, 21 nt, Homo sapiens
auugacacuucugugaguaga

SEQ ID NO: 4212 - RNA, 21 nt, Homo sapiens
ucuacucacagaagugucaau

SEQ ID NO: 4213 - RNA, 23 nt, Homo sapiens
uacucuggagagugacaaucaug

SEQ ID NO: 4214 - RNA, 23 nt, Homo sapiens
caugauugucacucuccagagua

SEQ ID NO: 4215 - RNA, 21 nt, Homo sapiens
auugacaccucugugagugga

SEQ ID NO: 4216 - RNA, 21 nt, Homo sapiens
uccacucacagaggugucaau

SEQ ID NO: 4217 - RNA, 22 nt, Homo sapiens
uucucaagagggaggcaaucau

SEQ ID NO: 4218 - RNA, 22 nt, Homo sapiens
augauugccucccucuugagaa

SEQ ID NO: 4219 - RNA, 22 nt, Homo sapiens
gagugccuucuuuuggagcguu

SEQ ID NO: 4220 - RNA, 22 nt, Homo sapiens
aacgcuccaaaagaaggcacuc

SEQ ID NO: 4221 - RNA, 18 nt, Homo sapiens
ugcuuccuuucagagggu

SEQ ID NO: 4222 - RNA, 18 nt, Homo sapiens
acccucugaaaggaagca

SEQ ID NO: 4223 - RNA, 22 nt, Homo sapiens
aucuggagguaagaagcacuuu

SEQ ID NO: 4224 - RNA, 22 nt, Homo sapiens
aaagugcuucuuaccuccagau

SEQ ID NO: 4225 - RNA, 22 nt, Homo sapiens
gaaagcgcuucccuuugcugga

SEQ ID NO: 4226 - RNA, 22 nt, Homo sapiens
uccagcaaagggaagcgcuuuc

SEQ ID NO: 4227 - RNA, 20 nt, Homo sapiens
cugcaaagggaagcccuuuc

SEQ ID NO: 4228 - RNA, 20 nt, Homo sapiens
gaaagggcuucccuuugcag

SEQ ID NO: 4229 - RNA, 21 nt, Homo sapiens
caaagcgcuucccuuuggagc

SEQ ID NO: 4230 - RNA, 21 nt, Homo sapiens
gcuccaaagggaagcgcuuug

SEQ ID NO: 4231 - RNA, 22 nt, Homo sapiens
cucuagagggaagcacuuucug

SEQ ID NO: 4232 - RNA, 22 nt, Homo sapiens
cagaaagugcuucccucuagag

SEQ ID NO: 4233 - RNA, 21 nt, Homo sapiens
aaagcgcuucccuucagagug

SEQ ID NO: 4234 - RNA, 21 nt, Homo sapiens
cacucugaagggaagcgcuuu

SEQ ID NO: 4235 - RNA, 22 nt, Homo sapiens
cucuagagggaagcgcuuucug

SEQ ID NO: 4236 - RNA, 22 nt, Homo sapiens
cagaaagcgcuucccucuagag

SEQ ID NO: 4237 - RNA, 22 nt, Homo sapiens
aaagugcauccuuuuagagguu

SEQ ID NO: 4238 - RNA, 22 nt, Homo sapiens
aaccucuaaaaggaugcacuuu

SEQ ID NO: 4239 - RNA, 22 nt, Homo sapiens
cucuagagggaagcgcuuucug

SEQ ID NO: 4240 - RNA, 22 nt, Homo sapiens
cagaaagcgcuucccucuagag

SEQ ID NO: 4241 - RNA, 22 nt, Homo sapiens
aaagugcaucuuuuuagaggau

SEQ ID NO: 4242 - RNA, 22 nt, Homo sapiens
auccucuaaaaagaugcacuuu

SEQ ID NO: 4243 - RNA, 22 nt, Homo sapiens
cucuagagggaagcgcuuucug

SEQ ID NO: 4244 - RNA, 22 nt, Homo sapiens
cagaaagcgcuucccucuagag

SEQ ID NO: 4245 - RNA, 21 nt, Homo sapiens
aaagugcuuccuuuuagaggg

SEQ ID NO: 4246 - RNA, 21 nt, Homo sapiens
cccucuaaaaggaagcacuuu

SEQ ID NO: 4247 - RNA, 22 nt, Homo sapiens
aaagugcuuccuuuuagagggu

SEQ ID NO: 4248 - RNA, 22 nt, Homo sapiens
acccucuaaaaggaagcacuuu

SEQ ID NO: 4249 - RNA, 22 nt, Homo sapiens
cucuagagggaagcacuuucug

SEQ ID NO: 4250 - RNA, 22 nt, Homo sapiens
cagaaagugcuucccucuagag

SEQ ID NO: 4251 - RNA, 22 nt, Homo sapiens
aaagugcuucucuuuggugggu

SEQ ID NO: 4252 - RNA, 22 nt, Homo sapiens
acccaccaaagagaagcacuuu

SEQ ID NO: 4253 - RNA, 20 nt, Homo sapiens
cuacaaagggaagcccuuuc

SEQ ID NO: 4254 - RNA, 20 nt, Homo sapiens
gaaagggcuucccuuuguag

SEQ ID NO: 4255 - RNA, 21 nt, Homo sapiens
aaagugcuuccuuuuugaggg

SEQ ID NO: 4256 - RNA, 21 nt, Homo sapiens
cccucaaaaaggaagcacuuu

SEQ ID NO: 4257 - RNA, 22 nt, Homo sapiens
aagugcuuccuuuuagaggguu

SEQ ID NO: 4258 - RNA, 22 nt, Homo sapiens
aacccucuaaaaggaagcacuu

SEQ ID NO: 4259 - RNA, 24 nt, Homo sapiens
acaaagugcuucccuuuagagugu

SEQ ID NO: 4260 - RNA, 24 nt, Homo sapiens
acacucuaaagggaagcacuuugu

SEQ ID NO: 4261 - RNA, 22 nt, Homo sapiens
aacgcacuucccuuuagagugu

SEQ ID NO: 4262 - RNA, 22 nt, Homo sapiens
acacucuaaagggaagugcguu

SEQ ID NO: 4263 - RNA, 22 nt, Homo sapiens
aaaaugguucccuuuagagugu

SEQ ID NO: 4264 - RNA, 22 nt, Homo sapiens
acacucuaaagggaaccauuuu

SEQ ID NO: 4265 - RNA, 22 nt, Homo sapiens
cucuagagggaagcgcuuucug

SEQ ID NO: 4266 - RNA, 22 nt, Homo sapiens
cagaaagcgcuucccucuagag

SEQ ID NO: 4267 - RNA, 23 nt, Homo sapiens
gaacgcgcuucccuauagagggu

SEQ ID NO: 4268 - RNA, 23 nt, Homo sapiens
acccucuauagggaagcgcguuc

SEQ ID NO: 4269 - RNA, 22 nt, Homo sapiens
cucuagagggaagcgcuuucug

SEQ ID NO: 4270 - RNA, 22 nt, Homo sapiens
cagaaagcgcuucccucuagag

SEQ ID NO: 4271 - RNA, 21 nt, Homo sapiens
gaaggcgcuucccuuuggagu

SEQ ID NO: 4272 - RNA, 21 nt, Homo sapiens
acuccaaagggaagcgccuuc

SEQ ID NO: 4273 - RNA, 20 nt, Homo sapiens
cugcaaagggaagcccuuuc

SEQ ID NO: 4274 - RNA, 20 nt, Homo sapiens
gaaagggcuucccuuugcag

SEQ ID NO: 4275 - RNA, 22 nt, Homo sapiens
ccucccacacccaaggcuugca

SEQ ID NO: 4276 - RNA, 22 nt, Homo sapiens
ugcaagccuugggugugggagg

SEQ ID NO: 4277 - RNA, 22 nt, Homo sapiens
caugccuugaguguaggaccgu

SEQ ID NO: 4278 - RNA, 22 nt, Homo sapiens
acgguccuacacucaaggcaug

SEQ ID NO: 4279 - RNA, 22 nt, Homo sapiens
aucauacaaggacaauuucuuu

SEQ ID NO: 4280 - RNA, 22 nt, Homo sapiens
aaagaaauuguccuuguaugau

SEQ ID NO: 4281 - RNA, 22 nt, Homo sapiens
ggagaaauuauccuuggugugu

SEQ ID NO: 4282 - RNA, 22 nt, Homo sapiens
acacaccaaggauaauuucucc

SEQ ID NO: 4283 - RNA, 22 nt, Homo sapiens
uggugggcacagaaucuggacu

SEQ ID NO: 4284 - RNA, 22 nt, Homo sapiens
aguccagauucugugcccacca

SEQ ID NO: 4285 - RNA, 25 nt, Homo sapiens
aaaggauucugcugucggucccacu

SEQ ID NO: 4286 - RNA, 25 nt, Homo sapiens
agugggaccgacagcagaauccuuu

SEQ ID NO: 4287 - RNA, 23 nt, Homo sapiens
ucggggaucaucaugucacgaga

SEQ ID NO: 4288 - RNA, 23 nt, Homo sapiens
ucucgugacaugaugauccccga

SEQ ID NO: 4289 - RNA, 22 nt, Homo sapiens
aaacauucgcggugcacuucuu

SEQ ID NO: 4290 - RNA, 22 nt, Homo sapiens
aagaagugcaccgcgaauguuu

SEQ ID NO: 4291 - RNA, 22 nt, Homo sapiens
auucugcauuuuuagcaaguuc

SEQ ID NO: 4292 - RNA, 22 nt, Homo sapiens
gaacuugcuaaaaaugcagaau

SEQ ID NO: 4293 - RNA, 22 nt, Homo sapiens
accugagguugugcauuucuaa

SEQ ID NO: 4294 - RNA, 22 nt, Homo sapiens
uuagaaaugcacaaccucaggu

SEQ ID NO: 4295 - RNA, 22 nt, Homo sapiens
ucagcaaacauuuauugugugc

SEQ ID NO: 4296 - RNA, 22 nt, Homo sapiens
gcacacaauaaauguuugcuga

SEQ ID NO: 4297 - RNA, 22 nt, Homo sapiens
ucaguaaauguuuauuagauga

SEQ ID NO: 4298 - RNA, 22 nt, Homo sapiens
ucaucuaauaaacauuuacuga

SEQ ID NO: 4299 - RNA, 22 nt, Homo sapiens
agcuacaguuacuuuugcacca

SEQ ID NO: 4300 - RNA, 22 nt, Homo sapiens
uggugcaaaaguaacuguagcu

SEQ ID NO: 4301 - RNA, 20 nt, Homo sapiens
uaaaaacugcaauuacuuuc

SEQ ID NO: 4302 - RNA, 20 nt, Homo sapiens
gaaaguaauugcaguuuuua

SEQ ID NO: 4303 - RNA, 23 nt, Homo sapiens
ugcaaaaguaauugcaguuuuug

SEQ ID NO: 4304 - RNA, 23 nt, Homo sapiens
caaaaacugcaauuacuuuugca

SEQ ID NO: 4305 - RNA, 22 nt, Homo sapiens
aaagaccgugacuacuuuugca

SEQ ID NO: 4306 - RNA, 22 nt, Homo sapiens
ugcaaaaguagucacggucuuu

SEQ ID NO: 4307 - RNA, 22 nt, Homo sapiens
agaaguaacuacgguuuuugca

SEQ ID NO: 4308 - RNA, 22 nt, Homo sapiens
ugcaaaaaccguaguuacuucu

SEQ ID NO: 4309 - RNA, 19 nt, Homo sapiens
aaaaaccacaauuacuuuu

SEQ ID NO: 4310 - RNA, 19 nt, Homo sapiens
aaaaguaauugugguuuuu

SEQ ID NO: 4311 - RNA, 19 nt, Homo sapiens
aaaaguaauugcggucuuu

SEQ ID NO: 4312 - RNA, 19 nt, Homo sapiens
aaagaccgcaauuacuuuu

SEQ ID NO: 4313 - RNA, 22 nt, Homo sapiens
caaaaacugcaauuacuuuugc

SEQ ID NO: 4314 - RNA, 22 nt, Homo sapiens
gcaaaaguaauugcaguuuuug

SEQ ID NO: 4315 - RNA, 22 nt, Homo sapiens
gaaaguaauugcuguuuuugcc

SEQ ID NO: 4316 - RNA, 22 nt, Homo sapiens
ggcaaaaacagcaauuacuuuc

SEQ ID NO: 4317 - RNA, 21 nt, Homo sapiens
uaaaacugcaguuauuuuugc

SEQ ID NO: 4318 - RNA, 21 nt, Homo sapiens
gcaaaaauaacugcaguuuua

SEQ ID NO: 4319 - RNA, 21 nt, Homo sapiens
aaaaguaauugcaguuuuugc

SEQ ID NO: 4320 - RNA, 21 nt, Homo sapiens
gcaaaaacugcaauuacuuuu

SEQ ID NO: 4321 - RNA, 22 nt, Homo sapiens
uaaaacccacaauuauguuugu

SEQ ID NO: 4322 - RNA, 22 nt, Homo sapiens
acaaacauaauuguggguuuua

SEQ ID NO: 4323 - RNA, 22 nt, Homo sapiens
aaaaguaauugcggguuuugcc

SEQ ID NO: 4324 - RNA, 22 nt, Homo sapiens
ggcaaaacccgcaauuacuuuu

SEQ ID NO: 4325 - RNA, 21 nt, Homo sapiens
caaaaccgcaguaacuuuugu

SEQ ID NO: 4326 - RNA, 21 nt, Homo sapiens
acaaaaguuacugcgguuuug

SEQ ID NO: 4327 - RNA, 22 nt, Homo sapiens
aaaaguuauugcgguuuuggcu

SEQ ID NO: 4328 - RNA, 22 nt, Homo sapiens
agccaaaaccgcaauaacuuuu

SEQ ID NO: 4329 - RNA, 21 nt, Homo sapiens
uggcaguuacuuuugcaccag

SEQ ID NO: 4330 - RNA, 21 nt, Homo sapiens
cuggugcaaaaguaacugcca

SEQ ID NO: 4331 - RNA, 21 nt, Homo sapiens
aaaaguaauugcgguuuuugc

SEQ ID NO: 4332 - RNA, 21 nt, Homo sapiens
gcaaaaaccgcaauuacuuuu

SEQ ID NO: 4333 - RNA, 20 nt, Homo sapiens
aaaacugcaguuacuuuugc

SEQ ID NO: 4334 - RNA, 20 nt, Homo sapiens
gcaaaaguaacugcaguuuu

SEQ ID NO: 4335 - RNA, 18 nt, Homo sapiens
aaaaguacuugcggauuu

SEQ ID NO: 4336 - RNA, 18 nt, Homo sapiens
aaauccgcaaguacuuuu

SEQ ID NO: 4337 - RNA, 20 nt, Homo sapiens
gugcaaaagucaucacgguu

SEQ ID NO: 4338 - RNA, 20 nt, Homo sapiens
aaccgugaugacuuuugcac

SEQ ID NO: 4339 - RNA, 22 nt, Homo sapiens
gcuggugcaaaaguaauggcgg

SEQ ID NO: 4340 - RNA, 22 nt, Homo sapiens
ccgccauuacuuuugcaccagc

SEQ ID NO: 4341 - RNA, 22 nt, Homo sapiens
aaaaguaaucacuguuuuugcc

SEQ ID NO: 4342 - RNA, 22 nt, Homo sapiens
ggcaaaaacagugauuacuuuu

SEQ ID NO: 4343 - RNA, 20 nt, Homo sapiens
agugccugagggaguaagag

SEQ ID NO: 4344 - RNA, 20 nt, Homo sapiens
cucuuacucccucaggcacu

SEQ ID NO: 4345 - RNA, 22 nt, Homo sapiens
ugucuuacucccucaggcacau

SEQ ID NO: 4346 - RNA, 22 nt, Homo sapiens
augugccugagggaguaagaca

SEQ ID NO: 4347 - RNA, 23 nt, Homo sapiens
agugccugagggaguaagagccc

SEQ ID NO: 4348 - RNA, 23 nt, Homo sapiens
gggcucuuacucccucaggcacu

SEQ ID NO: 4349 - RNA, 21 nt, Homo sapiens
gcgacccacucuugguuucca

SEQ ID NO: 4350 - RNA, 21 nt, Homo sapiens
uggaaaccaagagugggucgc

SEQ ID NO: 4351 - RNA, 22 nt, Homo sapiens
uuagcuuaaggaguaccagauc

SEQ ID NO: 4352 - RNA, 22 nt, Homo sapiens
gaucugguacuccuuaagcuaa

SEQ ID NO: 4353 - RNA, 21 nt, Homo sapiens
uaugguacuccuuaagcuaac

SEQ ID NO: 4354 - RNA, 21 nt, Homo sapiens
guuagcuuaaggaguaccaua

SEQ ID NO: 4355 - RNA, 19 nt, Homo sapiens
ugagcugcuguaccaaaau

SEQ ID NO: 4356 - RNA, 19 nt, Homo sapiens
auuuugguacagcagcuca

SEQ ID NO: 4357 - RNA, 22 nt, Homo sapiens
cacauaugaagugagccagcac

SEQ ID NO: 4358 - RNA, 22 nt, Homo sapiens
gugcuggcucacuucauaugug

SEQ ID NO: 4359 - RNA, 22 nt, Homo sapiens
ugcuggcucauuucauaugugu

SEQ ID NO: 4360 - RNA, 22 nt, Homo sapiens
acacauaugaaaugagccagca

SEQ ID NO: 4361 - RNA, 22 nt, Homo sapiens
uuccaugccuccuagaaguucc

SEQ ID NO: 4362 - RNA, 22 nt, Homo sapiens
ggaacuucuaggaggcauggaa

SEQ ID NO: 4363 - RNA, 22 nt, Homo sapiens
agccuuccaggagaaauggaga

SEQ ID NO: 4364 - RNA, 22 nt, Homo sapiens
ucuccauuucuccuggaaggcu

SEQ ID NO: 4365 - RNA, 22 nt, Homo sapiens
uaaaacuuuaagugugccuagg

SEQ ID NO: 4366 - RNA, 22 nt, Homo sapiens
ccuaggcacacuuaaaguuuua

SEQ ID NO: 4367 - RNA, 22 nt, Homo sapiens
uaggcacacuuaaaguuauagc

SEQ ID NO: 4368 - RNA, 22 nt, Homo sapiens
gcuauaacuuuaagugugccua

SEQ ID NO: 4369 - RNA, 22 nt, Homo sapiens
gaauauggguauauuaguuugg

SEQ ID NO: 4370 - RNA, 22 nt, Homo sapiens
ccaaacuaauauacccauauuc

SEQ ID NO: 4371 - RNA, 22 nt, Homo sapiens
aaacuaauauacccauauucug

SEQ ID NO: 4372 - RNA, 22 nt, Homo sapiens
cagaauauggguauauuaguuu

SEQ ID NO: 4373 - RNA, 22 nt, Homo sapiens
uaguucuucccuuugcccaauu

SEQ ID NO: 4374 - RNA, 22 nt, Homo sapiens
aauugggcaaagggaagaacua

SEQ ID NO: 4375 - RNA, 22 nt, Homo sapiens
cagggaaaugggaagaacuaga

SEQ ID NO: 4376 - RNA, 22 nt, Homo sapiens
ucuaguucuucccauuucccug

SEQ ID NO: 4377 - RNA, 22 nt, Homo sapiens
cugaauagcugggacuacaggu

SEQ ID NO: 4378 - RNA, 22 nt, Homo sapiens
accuguagucccagcuauucag

SEQ ID NO: 4379 - RNA, 22 nt, Homo sapiens
ugaaguaccagcuacucgagag

SEQ ID NO: 4380 - RNA, 22 nt, Homo sapiens
cucucgaguagcugguacuuca

SEQ ID NO: 4381 - RNA, 22 nt, Homo sapiens
cagagugacaagcugguuaaag

SEQ ID NO: 4382 - RNA, 22 nt, Homo sapiens
cuuuaaccagcuugucacucug

SEQ ID NO: 4383 - RNA, 22 nt, Homo sapiens
uauccagcuuguuacuauaugc

SEQ ID NO: 4384 - RNA, 22 nt, Homo sapiens
gcauauaguaacaagcuggaua

SEQ ID NO: 4385 - RNA, 21 nt, Homo sapiens
gccccgggcagugugaucauc

SEQ ID NO: 4386 - RNA, 21 nt, Homo sapiens
gaugaucacacugcccggggc

SEQ ID NO: 4387 - RNA, 18 nt, Homo sapiens
auggucaccuccgggacu

SEQ ID NO: 4388 - RNA, 18 nt, Homo sapiens
agucccggaggugaccau

SEQ ID NO: 4389 - RNA, 19 nt, Homo sapiens
aagucccacuaaugccagc

SEQ ID NO: 4390 - RNA, 19 nt, Homo sapiens
gcuggcauuagugggacuu

SEQ ID NO: 4391 - RNA, 21 nt, Homo sapiens
acuggcauuagugggacuuuu

SEQ ID NO: 4392 - RNA, 21 nt, Homo sapiens
aaaagucccacuaaugccagu

SEQ ID NO: 4393 - RNA, 23 nt, Homo sapiens
ugcacauggcaaccuagcuccca

SEQ ID NO: 4394 - RNA, 23 nt, Homo sapiens
ugggagcuagguugccaugugca

SEQ ID NO: 4395 - RNA, 21 nt, Homo sapiens
ggcugggugcucuugugcagu

SEQ ID NO: 4396 - RNA, 21 nt, Homo sapiens
acugcacaagagcacccagcc

SEQ ID NO: 4397 - RNA, 21 nt, Homo sapiens
uaaaguaaauaugcaccaaaa

SEQ ID NO: 4398 - RNA, 21 nt, Homo sapiens
uuuuggugcauauuuacuuua

SEQ ID NO: 4399 - RNA, 21 nt, Homo sapiens
aauaaaguucauguauggcaa

SEQ ID NO: 4400 - RNA, 21 nt, Homo sapiens
uugccauacaugaacuuuauu

SEQ ID NO: 4401 - RNA, 21 nt, Homo sapiens
uugccauacauagacuuuauu

SEQ ID NO: 4402 - RNA, 21 nt, Homo sapiens
aauaaagucuauguauggcaa

SEQ ID NO: 4403 - RNA, 21 nt, Homo sapiens
auacccauagcuuagcuccca

SEQ ID NO: 4404 - RNA, 21 nt, Homo sapiens
ugggagcuaagcuauggguau

SEQ ID NO: 4405 - RNA, 21 nt, Homo sapiens
ugggagcuaagcuauggguau

SEQ ID NO: 4406 - RNA, 21 nt, Homo sapiens
auacccauagcuuagcuccca

SEQ ID NO: 4407 - RNA, 22 nt, Homo sapiens
caaaguuuaagauccuugaagu

SEQ ID NO: 4408 - RNA, 22 nt, Homo sapiens
acuucaaggaucuuaaacuuug

SEQ ID NO: 4409 - RNA, 22 nt, Homo sapiens
aucaaggaucuuaaacuuugcc

SEQ ID NO: 4410 - RNA, 22 nt, Homo sapiens
ggcaaaguuuaagauccuugau

SEQ ID NO: 4411 - RNA, 20 nt, Homo sapiens
aaaguagcuguaccauuugc

SEQ ID NO: 4412 - RNA, 20 nt, Homo sapiens
gcaaaugguacagcuacuuu

SEQ ID NO: 4413 - RNA, 19 nt, Homo sapiens
aggcacggugucagcaggc

SEQ ID NO: 4414 - RNA, 19 nt, Homo sapiens
gccugcugacaccgugccu

SEQ ID NO: 4415 - RNA, 19 nt, Homo sapiens
gggcgccugugaucccaac

SEQ ID NO: 4416 - RNA, 19 nt, Homo sapiens
guugggaucacaggcgccc

SEQ ID NO: 4417 - RNA, 23 nt, Homo sapiens
aguauguucuuccaggacagaac

SEQ ID NO: 4418 - RNA, 23 nt, Homo sapiens
guucuguccuggaagaacauacu

SEQ ID NO: 4419 - RNA, 22 nt, Homo sapiens
gagaaaugcuggacuaaucugc

SEQ ID NO: 4420 - RNA, 22 nt, Homo sapiens
gcagauuaguccagcauuucuc

SEQ ID NO: 4421 - RNA, 22 nt, Homo sapiens
agaaaggguggcaauaccucuu

SEQ ID NO: 4422 - RNA, 22 nt, Homo sapiens
aagagguauugccacccuuucu

SEQ ID NO: 4423 - RNA, 22 nt, Homo sapiens
agguauugccacccuuucuagu

SEQ ID NO: 4424 - RNA, 22 nt, Homo sapiens
acuagaaaggguggcaauaccu

SEQ ID NO: 4425 - RNA, 22 nt, Homo sapiens
guagcaccuugcaggauaaggu

SEQ ID NO: 4426 - RNA, 22 nt, Homo sapiens
accuuauccugcaaggugcuac

SEQ ID NO: 4427 - RNA, 24 nt, Homo sapiens
uacagaugcagauucucugacuuc

SEQ ID NO: 4428 - RNA, 24 nt, Homo sapiens
gaagucagagaaucugcaucugua

SEQ ID NO: 4429 - RNA, 20 nt, Homo sapiens
aacucuagccugagcaacag

SEQ ID NO: 4430 - RNA, 20 nt, Homo sapiens
cuguugcucaggcuagaguu

SEQ ID NO: 4431 - RNA, 22 nt, Homo sapiens
acagcccagcaguuaucacggg

SEQ ID NO: 4432 - RNA, 22 nt, Homo sapiens
cccgugauaacugcugggcugu

SEQ ID NO: 4433 - RNA, 21 nt, Homo sapiens
uaucguaucguauuguauugu

SEQ ID NO: 4434 - RNA, 21 nt, Homo sapiens
acaauacaauacgauacgaua

SEQ ID NO: 4435 - RNA, 22 nt, Homo sapiens
uuagaacguuuuagggucaaau

SEQ ID NO: 4436 - RNA, 22 nt, Homo sapiens
auuugacccuaaaacguucuaa

SEQ ID NO: 4437 - RNA, 22 nt, Homo sapiens
uaacaaacaccuguaaaacagc

SEQ ID NO: 4438 - RNA, 22 nt, Homo sapiens
gcuguuuuacagguguuuguua

SEQ ID NO: 4439 - RNA, 22 nt, Homo sapiens
agcauacaccuguaguccuaga

SEQ ID NO: 4440 - RNA, 22 nt, Homo sapiens
ucuaggacuacagguguaugcu

SEQ ID NO: 4441 - RNA, 21 nt, Homo sapiens
aguuaaugaauccuggaaagu

SEQ ID NO: 4442 - RNA, 21 nt, Homo sapiens
acuuuccaggauucauuaacu

SEQ ID NO: 4443 - RNA, 21 nt, Homo sapiens
ucagcuacuaccucuauuagg

SEQ ID NO: 4444 - RNA, 21 nt, Homo sapiens
ccuaauagagguaguagcuga

SEQ ID NO: 4445 - RNA, 22 nt, Homo sapiens
uugcucugagcuccgagaaagc

SEQ ID NO: 4446 - RNA, 22 nt, Homo sapiens
gcuuucucggagcucagagcaa

SEQ ID NO: 4447 - RNA, 22 nt, Homo sapiens
caaauaauaccacagugggugu

SEQ ID NO: 4448 - RNA, 22 nt, Homo sapiens
acacccacugugguauuauuug

SEQ ID NO: 4449 - RNA, 20 nt, Homo sapiens
aauaauaucacaguaggugu

SEQ ID NO: 4450 - RNA, 20 nt, Homo sapiens
acaccuacugugauauuauu

SEQ ID NO: 4451 - RNA, 22 nt, Homo sapiens
aauaauaucacaguagguguac

SEQ ID NO: 4452 - RNA, 22 nt, Homo sapiens
guacaccuacugugauauuauu

SEQ ID NO: 4453 - RNA, 22 nt, Homo sapiens
gcaguggcucugaaaugaacuc

SEQ ID NO: 4454 - RNA, 22 nt, Homo sapiens
gaguucauuucagagccacugc

SEQ ID NO: 4455 - RNA, 21 nt, Homo sapiens
cagaucaugggacugucucag

SEQ ID NO: 4456 - RNA, 21 nt, Homo sapiens
cugagacagucccaugaucug

SEQ ID NO: 4457 - RNA, 22 nt, Homo sapiens
acuccaagaagaaucuagacag

SEQ ID NO: 4458 - RNA, 22 nt, Homo sapiens
cugucuagauucuucuuggagu

SEQ ID NO: 4459 - RNA, 22 nt, Homo sapiens
cucauuuaaguagucugaugcc

SEQ ID NO: 4460 - RNA, 22 nt, Homo sapiens
ggcaucagacuacuuaaaugag

SEQ ID NO: 4461 - RNA, 22 nt, Homo sapiens
ucaaguaguuucaugauaaagg

SEQ ID NO: 4462 - RNA, 22 nt, Homo sapiens
ccuuuaucaugaaacuacuuga

SEQ ID NO: 4463 - RNA, 22 nt, Homo sapiens
ugggggagugcagugauugugg

SEQ ID NO: 4464 - RNA, 22 nt, Homo sapiens
ccacaaucacugcacuccccca

SEQ ID NO: 4465 - RNA, 22 nt, Homo sapiens
uccugucuuuccuuguuggagc

SEQ ID NO: 4466 - RNA, 22 nt, Homo sapiens
gcuccaacaaggaaagacagga

SEQ ID NO: 4467 - RNA, 22 nt, Homo sapiens
uaaugcauuaaauuauugaagg

SEQ ID NO: 4468 - RNA, 22 nt, Homo sapiens
ccuucaauaauuuaaugcauua

SEQ ID NO: 4469 - RNA, 19 nt, Homo sapiens
uuauugucacguucugauu

SEQ ID NO: 4470 - RNA, 19 nt, Homo sapiens
aaucagaacgugacaauaa

SEQ ID NO: 4471 - RNA, 22 nt, Homo sapiens
ugagucagcaacauaucccaug

SEQ ID NO: 4472 - RNA, 22 nt, Homo sapiens
caugggauauguugcugacuca

SEQ ID NO: 4473 - RNA, 18 nt, Homo sapiens
aggagaagucgggaaggu

SEQ ID NO: 4474 - RNA, 18 nt, Homo sapiens
accuucccgacuucuccu

SEQ ID NO: 4475 - RNA, 22 nt, Homo sapiens
cgaaaacagcaauuaccuuugc

SEQ ID NO: 4476 - RNA, 22 nt, Homo sapiens
gcaaagguaauugcuguuuucg

SEQ ID NO: 4477 - RNA, 22 nt, Homo sapiens
uuaggccaucaucccauuaugc

SEQ ID NO: 4478 - RNA, 22 nt, Homo sapiens
gcauaaugggaugauggccuaa

SEQ ID NO: 4479 - RNA, 23 nt, Homo sapiens
uguuucggggcucauggccugug

SEQ ID NO: 4480 - RNA, 23 nt, Homo sapiens
cacaggccaugagccccgaaaca

SEQ ID NO: 4481 - RNA, 22 nt, Homo sapiens
aaagguaauugcaguuuuuccc

SEQ ID NO: 4482 - RNA, 22 nt, Homo sapiens
gggaaaaacugcaauuaccuuu

SEQ ID NO: 4483 - RNA, 22 nt, Homo sapiens
uucuggauaacaugcugaagcu

SEQ ID NO: 4484 - RNA, 22 nt, Homo sapiens
agcuucagcauguuauccagaa

SEQ ID NO: 4485 - RNA, 22 nt, Homo sapiens
acguuugaaugcuguacaaggc

SEQ ID NO: 4486 - RNA, 22 nt, Homo sapiens
gccuuguacagcauucaaacgu

SEQ ID NO: 4487 - RNA, 20 nt, Homo sapiens
augagcgacugugccugacc

SEQ ID NO: 4488 - RNA, 20 nt, Homo sapiens
ggucaggcacagucgcucau

SEQ ID NO: 4489 - RNA, 19 nt, Homo sapiens
gagccaguuggacaggagc

SEQ ID NO: 4490 - RNA, 19 nt, Homo sapiens
gcuccuguccaacuggcuc

SEQ ID NO: 4491 - RNA, 23 nt, Homo sapiens
uucauuugguauaaaccgcgauu

SEQ ID NO: 4492 - RNA, 23 nt, Homo sapiens
aaucgcgguuuauaccaaaugaa

SEQ ID NO: 4493 - RNA, 22 nt, Homo sapiens
uugagaaugaugaaucauuagg

SEQ ID NO: 4494 - RNA, 22 nt, Homo sapiens
ccuaaugauucaucauucucaa

SEQ ID NO: 4495 - RNA, 23 nt, Homo sapiens
uuacaguuguucaaccaguuacu

SEQ ID NO: 4496 - RNA, 23 nt, Homo sapiens
aguaacugguugaacaacuguaa

SEQ ID NO: 4497 - RNA, 21 nt, Homo sapiens
caaagaggaaggucccauuac

SEQ ID NO: 4498 - RNA, 21 nt, Homo sapiens
guaaugggaccuuccucuuug

SEQ ID NO: 4499 - RNA, 22 nt, Homo sapiens
ucaguuccaggccaaccaggcu

SEQ ID NO: 4500 - RNA, 22 nt, Homo sapiens
agccugguuggccuggaacuga

SEQ ID NO: 4501 - RNA, 22 nt, Homo sapiens
uuaugguuugccugggacugag

SEQ ID NO: 4502 - RNA, 22 nt, Homo sapiens
cucagucccaggcaaaccauaa

SEQ ID NO: 4503 - RNA, 19 nt, Homo sapiens
ugggcguaucuguaugcua

SEQ ID NO: 4504 - RNA, 19 nt, Homo sapiens
uagcauacagauacgccca

SEQ ID NO: 4505 - RNA, 20 nt, Homo sapiens
agaccauggguucucauugu

SEQ ID NO: 4506 - RNA, 20 nt, Homo sapiens
acaaugagaacccauggucu

SEQ ID NO: 4507 - RNA, 22 nt, Homo sapiens
uugugucaauaugcgaugaugu

SEQ ID NO: 4508 - RNA, 22 nt, Homo sapiens
acaucaucgcauauugacacaa

SEQ ID NO: 4509 - RNA, 19 nt, Homo sapiens
ugucucugcugggguuucu

SEQ ID NO: 4510 - RNA, 19 nt, Homo sapiens
agaaaccccagcagagaca

SEQ ID NO: 4511 - RNA, 25 nt, Homo sapiens
aggcaccagccaggcauugcucagc

SEQ ID NO: 4512 - RNA, 25 nt, Homo sapiens
gcugagcaaugccuggcuggugccu

SEQ ID NO: 4513 - RNA, 21 nt, Homo sapiens
gaagugugccguggugugucu

SEQ ID NO: 4514 - RNA, 21 nt, Homo sapiens
agacacaccacggcacacuuc

SEQ ID NO: 4515 - RNA, 21 nt, Homo sapiens
aagccugcccggcuccucggg

SEQ ID NO: 4516 - RNA, 21 nt, Homo sapiens
cccgaggagccgggcaggcuu

SEQ ID NO: 4517 - RNA, 20 nt, Homo sapiens
guugugucaguuuaucaaac

SEQ ID NO: 4518 - RNA, 20 nt, Homo sapiens
guuugauaaacugacacaac

SEQ ID NO: 4519 - RNA, 22 nt, Homo sapiens
uggucuaggauuguuggaggag

SEQ ID NO: 4520 - RNA, 22 nt, Homo sapiens
cuccuccaacaauccuagacca

SEQ ID NO: 4521 - RNA, 22 nt, Homo sapiens
cacacacugcaauuacuuuugc

SEQ ID NO: 4522 - RNA, 22 nt, Homo sapiens
gcaaaaguaauugcagugugug

SEQ ID NO: 4523 - RNA, 25 nt, Homo sapiens
aggggugguguugggacagcuccgu

SEQ ID NO: 4524 - RNA, 25 nt, Homo sapiens
acggagcugucccaacaccaccccu

SEQ ID NO: 4525 - RNA, 21 nt, Homo sapiens
ugagcuaaaugugugcuggga

SEQ ID NO: 4526 - RNA, 21 nt, Homo sapiens
ucccagcacacauuuagcuca

SEQ ID NO: 4527 - RNA, 23 nt, Homo sapiens
gcgaggaccccucggggucugac

SEQ ID NO: 4528 - RNA, 23 nt, Homo sapiens
gucagaccccgagggguccucgc

SEQ ID NO: 4529 - RNA, 25 nt, Homo sapiens
gcugggcagggcuucugagcuccuu

SEQ ID NO: 4530 - RNA, 25 nt, Homo sapiens
aaggagcucagaagcccugcccagc

SEQ ID NO: 4531 - RNA, 20 nt, Homo sapiens
gggaaaaggaagggggagga

SEQ ID NO: 4532 - RNA, 20 nt, Homo sapiens
uccucccccuuccuuuuccc

SEQ ID NO: 4533 - RNA, 20 nt, Homo sapiens
gcggaaggcggagcggcgga

SEQ ID NO: 4534 - RNA, 20 nt, Homo sapiens
uccgccgcuccgccuuccgc

SEQ ID NO: 4535 - RNA, 18 nt, Homo sapiens
gugaaggcccggcggaga

SEQ ID NO: 4536 - RNA, 18 nt, Homo sapiens
ucuccgccgggccuucac

SEQ ID NO: 4537 - RNA, 19 nt, Homo sapiens
ugagggagugggugggagg

SEQ ID NO: 4538 - RNA, 19 nt, Homo sapiens
ccucccacccacucccuca

SEQ ID NO: 4539 - RNA, 19 nt, Homo sapiens
acuggaauuggagucaaaa

SEQ ID NO: 4540 - RNA, 19 nt, Homo sapiens
uuuugacuccaauuccagu

SEQ ID NO: 4541 - RNA, 19 nt, Homo sapiens
ugagggaguuggguguaua

SEQ ID NO: 4542 - RNA, 19 nt, Homo sapiens
uauacacccaacucccuca

SEQ ID NO: 4543 - RNA, 19 nt, Homo sapiens
ugagggaguggauuguaug

SEQ ID NO: 4544 - RNA, 19 nt, Homo sapiens
cauacaauccacucccuca

SEQ ID NO: 4545 - RNA, 19 nt, Homo sapiens
ggcuggucagaugggagug

SEQ ID NO: 4546 - RNA, 19 nt, Homo sapiens
cacucccaucugaccagcc

SEQ ID NO: 4547 - RNA, 19 nt, Homo sapiens
agcagggcuggggauugca

SEQ ID NO: 4548 - RNA, 19 nt, Homo sapiens
ugcaauccccagcccugcu

SEQ ID NO: 4549 - RNA, 19 nt, Homo sapiens
ugagggaggagguugggua

SEQ ID NO: 4550 - RNA, 19 nt, Homo sapiens
uacccaaccuccucccuca

SEQ ID NO: 4551 - RNA, 19 nt, Homo sapiens
ugaggugguaggauguaga

SEQ ID NO: 4552 - RNA, 19 nt, Homo sapiens
ucuacauccuaccaccuca

SEQ ID NO: 4553 - RNA, 22 nt, Homo sapiens
uccgagccugggucucccucuu

SEQ ID NO: 4554 - RNA, 22 nt, Homo sapiens
aagagggagacccaggcucgga

SEQ ID NO: 4555 - RNA, 22 nt, Homo sapiens
ggggguccccggugcucggauc

SEQ ID NO: 4556 - RNA, 22 nt, Homo sapiens
gauccgagcaccggggaccccc

SEQ ID NO: 4557 - RNA, 22 nt, Homo sapiens
agucauuggaggguuugagcag

SEQ ID NO: 4558 - RNA, 22 nt, Homo sapiens
cugcucaaacccuccaaugacu

SEQ ID NO: 4559 - RNA, 19 nt, Homo sapiens
cagcaggaggugaggggag

SEQ ID NO: 4560 - RNA, 19 nt, Homo sapiens
cuccccucaccuccugcug

SEQ ID NO: 4561 - RNA, 22 nt, Homo sapiens
acucaaaacccuucagugacuu

SEQ ID NO: 4562 - RNA, 22 nt, Homo sapiens
aagucacugaaggguuuugagu

SEQ ID NO: 4563 - RNA, 22 nt, Homo sapiens
agacuucccauuugaagguggc

SEQ ID NO: 4564 - RNA, 22 nt, Homo sapiens
gccaccuucaaaugggaagucu

SEQ ID NO: 4565 - RNA, 23 nt, Homo sapiens
aaacucuacuuguccuucugagu

SEQ ID NO: 4566 - RNA, 23 nt, Homo sapiens
acucagaaggacaaguagaguuu

SEQ ID NO: 4567 - RNA, 21 nt, Homo sapiens
ggcuagcaacagcgcuuaccu

SEQ ID NO: 4568 - RNA, 21 nt, Homo sapiens
agguaagcgcuguugcuagcc

SEQ ID NO: 4569 - RNA, 21 nt, Homo sapiens
acagucugcugagguuggagc

SEQ ID NO: 4570 - RNA, 21 nt, Homo sapiens
gcuccaaccucagcagacugu

SEQ ID NO: 4571 - RNA, 23 nt, Homo sapiens
aucccuugcaggggcuguugggu

SEQ ID NO: 4572 - RNA, 23 nt, Homo sapiens
acccaacagccccugcaagggau

SEQ ID NO: 4573 - RNA, 22 nt, Homo sapiens
gugagucucuaagaaaagagga

SEQ ID NO: 4574 - RNA, 22 nt, Homo sapiens
uccucuuuucuuagagacucac

SEQ ID NO: 4575 - RNA, 21 nt, Homo sapiens
ucuaguaagaguggcagucga

SEQ ID NO: 4576 - RNA, 21 nt, Homo sapiens
ucgacugccacucuuacuaga

SEQ ID NO: 4577 - RNA, 22 nt, Homo sapiens
augcugacauauuuacuagagg

SEQ ID NO: 4578 - RNA, 22 nt, Homo sapiens
ccucuaguaaauaugucagcau

SEQ ID NO: 4579 - RNA, 22 nt, Homo sapiens
guucucccaacguaagcccagc

SEQ ID NO: 4580 - RNA, 22 nt, Homo sapiens
gcugggcuuacguugggagaac

SEQ ID NO: 4581 - RNA, 21 nt, Homo sapiens
uggguuuacguugggagaacu

SEQ ID NO: 4582 - RNA, 21 nt, Homo sapiens
aguucucccaacguaaaccca

SEQ ID NO: 4583 - RNA, 19 nt, Homo sapiens
gugucugcuuccuguggga

SEQ ID NO: 4584 - RNA, 19 nt, Homo sapiens
ucccacaggaagcagacac

SEQ ID NO: 4585 - RNA, 23 nt, Homo sapiens
cuaauaguaucuaccacaauaaa

SEQ ID NO: 4586 - RNA, 23 nt, Homo sapiens
uuuauugugguagauacuauuag

SEQ ID NO: 4587 - RNA, 23 nt, Homo sapiens
ugugcuugcucgucccgcccgca

SEQ ID NO: 4588 - RNA, 23 nt, Homo sapiens
ugcgggcgggacgagcaagcaca

SEQ ID NO: 4589 - RNA, 25 nt, Homo sapiens
agggaucgcgggcggguggcggccu

SEQ ID NO: 4590 - RNA, 25 nt, Homo sapiens
aggccgccacccgcccgcgaucccu

SEQ ID NO: 4591 - RNA, 21 nt, Homo sapiens
augauccaggaaccugccucu

SEQ ID NO: 4592 - RNA, 21 nt, Homo sapiens
agaggcagguuccuggaucau

SEQ ID NO: 4593 - RNA, 19 nt, Homo sapiens
aguguggcuuucuuagagc

SEQ ID NO: 4594 - RNA, 19 nt, Homo sapiens
gcucuaagaaagccacacu

SEQ ID NO: 4595 - RNA, 19 nt, Homo sapiens
ucuaggcugguacugcuga

SEQ ID NO: 4596 - RNA, 19 nt, Homo sapiens
ucagcaguaccagccuaga

SEQ ID NO: 4597 - RNA, 19 nt, Homo sapiens
aagcagcugccucugaggc

SEQ ID NO: 4598 - RNA, 19 nt, Homo sapiens
gccucagaggcagcugcuu

SEQ ID NO: 4599 - RNA, 21 nt, Homo sapiens
guggcugcacucacuuccuuc

SEQ ID NO: 4600 - RNA, 21 nt, Homo sapiens
gaaggaagugagugcagccac

SEQ ID NO: 4601 - RNA, 21 nt, Homo sapiens
aggaggcagcgcucucaggac

SEQ ID NO: 4602 - RNA, 21 nt, Homo sapiens
guccugagagcgcugccuccu

SEQ ID NO: 4603 - RNA, 21 nt, Homo sapiens
aauggcgccacuaggguugug

SEQ ID NO: 4604 - RNA, 21 nt, Homo sapiens
cacaacccuaguggcgccauu

SEQ ID NO: 4605 - RNA, 25 nt, Homo sapiens
caacccuaggagagggugccauuca

SEQ ID NO: 4606 - RNA, 25 nt, Homo sapiens
ugaauggcacccucuccuaggguug

SEQ ID NO: 4607 - RNA, 22 nt, Homo sapiens
auaauacaugguuaaccucuuu

SEQ ID NO: 4608 - RNA, 22 nt, Homo sapiens
aaagagguuaaccauguauuau

SEQ ID NO: 4609 - RNA, 21 nt, Homo sapiens
aauauuauacagucaaccucu

SEQ ID NO: 4610 - RNA, 21 nt, Homo sapiens
agagguugacuguauaauauu

SEQ ID NO: 4611 - RNA, 25 nt, Homo sapiens
ggcggagggaaguagguccguuggu

SEQ ID NO: 4612 - RNA, 25 nt, Homo sapiens
accaacggaccuacuucccuccgcc

SEQ ID NO: 4613 - RNA, 24 nt, Homo sapiens
ugccugggucucuggccugcgcgu

SEQ ID NO: 4614 - RNA, 24 nt, Homo sapiens
acgcgcaggccagagacccaggca

SEQ ID NO: 4615 - RNA, 22 nt, Homo sapiens
aggcggggcgccgcgggaccgc

SEQ ID NO: 4616 - RNA, 22 nt, Homo sapiens
gcggucccgcggcgccccgccu

SEQ ID NO: 4617 - RNA, 22 nt, Homo sapiens
gguggcccggccgugccugagg

SEQ ID NO: 4618 - RNA, 22 nt, Homo sapiens
ccucaggcacggccgggccacc

SEQ ID NO: 4619 - RNA, 20 nt, Homo sapiens
accaggaggcugaggccccu

SEQ ID NO: 4620 - RNA, 20 nt, Homo sapiens
aggggccucagccuccuggu

SEQ ID NO: 4621 - RNA, 20 nt, Homo sapiens
gucccugaguguauguggug

SEQ ID NO: 4622 - RNA, 20 nt, Homo sapiens
caccacauacacucagggac

SEQ ID NO: 4623 - RNA, 21 nt, Homo sapiens
uccgguucucagggcuccacc

SEQ ID NO: 4624 - RNA, 21 nt, Homo sapiens
gguggagcccugagaaccgga

SEQ ID NO: 4625 - RNA, 23 nt, Homo sapiens
aggaagcccuggaggggcuggag

SEQ ID NO: 4626 - RNA, 23 nt, Homo sapiens
cuccagccccuccagggcuuccu

SEQ ID NO: 4627 - RNA, 20 nt, Homo sapiens
cuguaugcccucaccgcuca

SEQ ID NO: 4628 - RNA, 20 nt, Homo sapiens
ugagcggugagggcauacag

SEQ ID NO: 4629 - RNA, 23 nt, Homo sapiens
uggugcggagagggcccacagug

SEQ ID NO: 4630 - RNA, 23 nt, Homo sapiens
cacugugggcccucuccgcacca

SEQ ID NO: 4631 - RNA, 22 nt, Homo sapiens
caacuagacugugagcuucuag

SEQ ID NO: 4632 - RNA, 22 nt, Homo sapiens
cuagaagcucacagucuaguug

SEQ ID NO: 4633 - RNA, 23 nt, Homo sapiens
aaggagcuuacaaucuagcuggg

SEQ ID NO: 4634 - RNA, 23 nt, Homo sapiens
cccagcuagauuguaagcuccuu

SEQ ID NO: 4635 - RNA, 22 nt, Homo sapiens
gggacccagggagagacguaag

SEQ ID NO: 4636 - RNA, 22 nt, Homo sapiens
cuuacgucucucccuggguccc

SEQ ID NO: 4637 - RNA, 22 nt, Homo sapiens
gcagagugcaaacaauuuugac

SEQ ID NO: 4638 - RNA, 22 nt, Homo sapiens
gucaaaauuguuugcacucugc

SEQ ID NO: 4639 - RNA, 20 nt, Homo sapiens
cggcucugggucugugggga

SEQ ID NO: 4640 - RNA, 20 nt, Homo sapiens
uccccacagacccagagccg

SEQ ID NO: 4641 - RNA, 22 nt, Homo sapiens
gcagcagggugaaacugacaca

SEQ ID NO: 4642 - RNA, 22 nt, Homo sapiens
ugugucaguuucacccugcugc

SEQ ID NO: 4643 - RNA, 21 nt, Homo sapiens
uggaggagaaggaaggugaug

SEQ ID NO: 4644 - RNA, 21 nt, Homo sapiens
caucaccuuccuucuccucca

SEQ ID NO: 4645 - RNA, 23 nt, Homo sapiens
ucugcucauaccccaugguuucu

SEQ ID NO: 4646 - RNA, 23 nt, Homo sapiens
agaaaccaugggguaugagcaga

SEQ ID NO: 4647 - RNA, 23 nt, Homo sapiens
ugcaccaugguugucugagcaug

SEQ ID NO: 4648 - RNA, 23 nt, Homo sapiens
caugcucagacaaccauggugca

SEQ ID NO: 4649 - RNA, 23 nt, Homo sapiens
cugggaucuccggggucuugguu

SEQ ID NO: 4650 - RNA, 23 nt, Homo sapiens
aaccaagaccccggagaucccag

SEQ ID NO: 4651 - RNA, 22 nt, Homo sapiens
ugagaccucuggguucugagcu

SEQ ID NO: 4652 - RNA, 22 nt, Homo sapiens
agcucagaacccagaggucuca

SEQ ID NO: 4653 - RNA, 23 nt, Homo sapiens
uccaguaccacgugucagggcca

SEQ ID NO: 4654 - RNA, 23 nt, Homo sapiens
uggcccugacacgugguacugga

SEQ ID NO: 4655 - RNA, 22 nt, Homo sapiens
ggagacugaugaguucccggga

SEQ ID NO: 4656 - RNA, 22 nt, Homo sapiens
ucccgggaacucaucagucucc

SEQ ID NO: 4657 - RNA, 21 nt, Homo sapiens
gcaggaacuugugagucuccu

SEQ ID NO: 4658 - RNA, 21 nt, Homo sapiens
aggagacucacaaguuccugc

SEQ ID NO: 4659 - RNA, 22 nt, Homo sapiens
cugcccuggcccgagggaccga

SEQ ID NO: 4660 - RNA, 22 nt, Homo sapiens
ucggucccucgggccagggcag

SEQ ID NO: 4661 - RNA, 21 nt, Homo sapiens
ccuggaaacacugagguugug

SEQ ID NO: 4662 - RNA, 21 nt, Homo sapiens
cacaaccucaguguuuccagg

SEQ ID NO: 4663 - RNA, 22 nt, Homo sapiens
uauaccucaguuuuaucaggug

SEQ ID NO: 4664 - RNA, 22 nt, Homo sapiens
caccugauaaaacugagguaua

SEQ ID NO: 4665 - RNA, 22 nt, Homo sapiens
uggugguuuacaaaguaauuca

SEQ ID NO: 4666 - RNA, 22 nt, Homo sapiens
ugaauuacuuuguaaaccacca

SEQ ID NO: 4667 - RNA, 22 nt, Homo sapiens
uggauuucuuugugaaucacca

SEQ ID NO: 4668 - RNA, 22 nt, Homo sapiens
uggugauucacaaagaaaucca

SEQ ID NO: 4669 - RNA, 21 nt, Homo sapiens
uccucuucucccuccucccag

SEQ ID NO: 4670 - RNA, 21 nt, Homo sapiens
cugggaggagggagaagagga

SEQ ID NO: 4671 - RNA, 20 nt, Homo sapiens
guagaggagauggcgcaggg

SEQ ID NO: 4672 - RNA, 20 nt, Homo sapiens
cccugcgccaucuccucuac

SEQ ID NO: 4673 - RNA, 22 nt, Homo sapiens
gugaacgggcgccaucccgagg

SEQ ID NO: 4674 - RNA, 22 nt, Homo sapiens
ccucgggauggcgcccguucac

SEQ ID NO: 4675 - RNA, 22 nt, Homo sapiens
gacugacaccucuuugggugaa

SEQ ID NO: 4676 - RNA, 22 nt, Homo sapiens
uucacccaaagaggugucaguc

SEQ ID NO: 4677 - RNA, 21 nt, Homo sapiens
uacucaaaaagcugucaguca

SEQ ID NO: 4678 - RNA, 21 nt, Homo sapiens
ugacugacagcuuuuugagua

SEQ ID NO: 4679 - RNA, 21 nt, Homo sapiens
uuaauaucggacaaccauugu

SEQ ID NO: 4680 - RNA, 21 nt, Homo sapiens
acaaugguuguccgauauuaa

SEQ ID NO: 4681 - RNA, 22 nt, Homo sapiens
auccgcgcucugacucucugcc

SEQ ID NO: 4682 - RNA, 22 nt, Homo sapiens
ggcagagagucagagcgcggau

SEQ ID NO: 4683 - RNA, 20 nt, Homo sapiens
gugagucaggguggggcugg

SEQ ID NO: 4684 - RNA, 20 nt, Homo sapiens
ccagccccacccugacucac

SEQ ID NO: 4685 - RNA, 22 nt, Homo sapiens
ugcccuuaaaggugaacccagu

SEQ ID NO: 4686 - RNA, 22 nt, Homo sapiens
acuggguucaccuuuaagggca

SEQ ID NO: 4687 - RNA, 22 nt, Homo sapiens
ucuucucuguuuuggccaugug

SEQ ID NO: 4688 - RNA, 22 nt, Homo sapiens
cacauggccaaaacagagaaga

SEQ ID NO: 4689 - RNA, 22 nt, Homo sapiens
aaauuauuguacaucggaugag

SEQ ID NO: 4690 - RNA, 22 nt, Homo sapiens
cucauccgauguacaauaauuu

SEQ ID NO: 4691 - RNA, 22 nt, Homo sapiens
uucaacggguauuuauugagca

SEQ ID NO: 4692 - RNA, 22 nt, Homo sapiens
ugcucaauaaauacccguugaa

SEQ ID NO: 4693 - RNA, 22 nt, Homo sapiens
cuauacaacuuacuacuuuccc

SEQ ID NO: 4694 - RNA, 22 nt, Homo sapiens
gggaaaguaguaaguuguauag

SEQ ID NO: 4695 - RNA, 22 nt, Homo sapiens
ugagguaguaaguuguauuguu

SEQ ID NO: 4696 - RNA, 22 nt, Homo sapiens
aacaauacaacuuacuaccuca

SEQ ID NO: 4697 - DNA, 3131 bp, Adeno-associated virus
gcggccgcgaattcgcccttggctgcgtcaactggaccaatgagaactttcccttcaatgattgcgtcgacaagatggtgatctggtgggaggagggcaagatgacggccaaggtcgtggagtccgccaaggccattctcggcggcagcaaggtgcgcgtggaccaaaagtgcaagtcgtccgcccagatcgaccccacccccgtgatcgtcacctccaacaccaacatgtgcgccgtgattgacgggaacagcaccaccttcgagcaccagcagcctctccaggaccggatgtttaagttcgaactcacccgccgtctggagcacgactttggcaaggtgacaaagcaggaagtcaaagagttcttccgctgggccagtgatcacgtgaccgaggtggcgcatgagttttacgtcagaaagggcggagccagcaaaagacccgcccccgatgacgcggataaaagcgagcccaagcgggcctgcccctcagtcgcggatccatcgacgtcagacgcggaaggagctccggtggactttgccgacaggtaccaaaacaaatgttctcgtcacgcgggcatgcttcagatgctgtttccctgcaaaacgtgcgagagaatgaatcggaatttcaacatttgcttcacacacggggtcagagactgctcagagtgtttccccggcgtgtcagaatctcaaccggtcgtcagaaagaggacgtatcggaaactccgtgcgattcatcatctgctggggcgggctcccgagattgcttgctcggcctgcgatctggtcaacgtggacctggatgactgtgtttctgagcaataaatgacttaaaccaggtatggctgccgatggttatcttccagattggctcgaggacaacctctctgagggcattcgcgagtggtgggcgctgaaacctggagccccgaagcccaaagccaaccagcaaaagcaggacgacggccggggtctggtgcttcctggctacaagtacctcggacccttcaacggactcgacaagggggagcccgtcaacgcggcggacgcagcggccctcgagcacgacaaggcttacgaccagcagctgcaggcgggtgacaatccgtacctgcggtataaccacgccgacgccgagtttcaggagcgtctgcaagaagatacgtcttttgggggcaacctcgggcgagcagtcttccaggccaagaagcgggttctcgaacctctcggtctggttgaggaaggcgctaagacggctcctggaaagaagagaccggtagagccatcaccccagcgttctccagactcctctacgggcatcggcaagaaaggccaacagcccgccagaaaaagactcaattttggtcagactggcgactcagagtcagttccagaccctcaacctctcggagaacctccagcagcgccctctggtgtgggacctaatacaatggctgcaggcggtggcgcaccaatggcagacaataacgaaggcgccgacggagtgggtagttcctcgggaaattggcattgcgattccacatggctgggcgacagagtcatcaccaccagcacccgaacctgggccctgcccacctacaacaaccacctctacaagcaaatctccaacgggacatcgggaggagccaccaacgacaacacctacttcggctacagcaccccctgggggtattttgactttaacagattccactgccacctttcaccacgtgactggcagcgactcatcaacaacaactggggattccgacccaagagactcagcttcaagctcttcaacatccaggtcaaggaggtcacgcagaatgaaggcaccaagaccatcgccaataacctcaccagcaccatccaggtgtttacggactcggagtaccagctgccgtacgttctcggctctgtccaccagggctgcctgcctccgttcccggcggacgtgttcatgattccccagtacggctacctaacactcaacaacggtagtcaggccgtgggacgctcctccttctactgcctggaatactttccttcgcagatgctgagaaccggcaacaacttccagtttacttacaccttcgaggacgtgcctttccacagcagctacgcccacagctagagcttggaccggctgatgaatcctctgattgaccagtacctgtactacttgtctcggactcaaacaacaggaggcacggcaaatacgcagactctgggcttcagccaaggtgggcctaatacaatggccaatcaggcaaagaactggctgccaggaccctgttaccgccaacaacgcgtctcaacgacaaccgggcaaaacaacaatagcaactttgcctggactgctgggaccaaataccatctgaatggaagaaattcattggctaatcctggcatcgctatggcaacacacaaagacgacgaggagcgtttttttcccagtaacgggatcctgatttttggcaaacaaaatgctgccagagacaatgcggattacagcgatgtcatgctcaccagcgaggaagaaatcaaaaccactaaccctgtggctacagaggaatacggtatcgtggcagataacttgcagcagcaaaacacggctcctcaaattggaactgtcaacagccagggggccttacccggtatggtctggcagaaccgggacgtgtacctgcagggtcccatctgggccaagattcctcacacggacggcaacttccacccgtctccgctgatgggcggctttggcctgaaacatcctccgcctcagatcctgatcaagaacacgcctgtacctgcggatcctccgaccaccttcaaccagtcaaagctgaactctttcatcacgcaatacagcaccggacaggtcagcgtggaaattgaatgggagctgcagaaggaaaacagcaagcgctggaaccccgagatccagtacacctccaactactacaaatctataagtgtggactttgctgttaatacagaaggcgtgtactctgaaccccgccccattggcacccgttacctcacccgtaatctgtaattgcctgttaatcaataaaccggttgattcgtttcagttgaactttggtctctgcgaagggcgaattc

SEQ ID NO: 4698 - protein, 728 aa, Adeno-associated virus
MAADGYLPDWLEDNLSEGIREWWDLKPGAPKPKANQQKQDDGRGLVLPGYKYLGPFNGLDKGEPVNEADAAALEHDKAYDKQLEQGDNPYLKYNHADAEFQERLQEDTSFGGNLGRAVFQAKKRVLEPLGLVEEGAKTAPGKKRPIESPDSSTGIGKKGQQPAKKKLNFGQTGDSESVPDPQPLGEPPAAPSGLGSGTMAAGGGAPMADNNEGADGVGNASGNWHCDSTWLGDRVITTSTRTWALPTYNNHLYKQISSQSGATNDNHFFGYSTPWGYFDFNRFHCHFSPRDWQRLINNNWGFRPRKLRFKLFNIQVKEVTTNDGVTTIANNLTSTIQVFSDSEYQLPYVLGSAHQGCLPPFPADVFMIPQYGYLTLNNGSQSMGRSSFYCLEYFPSQMLRTGNNFEFSYTFEEVPFHSSYAHSQSLDRLMNPLIDQYLYYLARTQSTTGSTRELQFHQAGPNTMAEQSKNWLPGPCYRQQRLSKNIDSNNNSNFAWTGATKYHLNGRNSLTNPGVAMATNKDDEGQFFPINGVLVFGKTGAANKTTLENVLMTSEEEIKTTNPVATEEYGVVSSNLQSSTAGPQTQTVNSQGALPGMVWQNRDVYLQGPIWAKIPHTDGNFHPSPLMGGFGLKHPPPQILIKNTPVPANPPGVFTPALFASFITQYSTGQVSVEIEWELQKENSKRWNPEIQYTSNYAKSNNVEFAVNNEGVYTEPRPIGTRYLTRNL

SEQ ID NO: 4699 - protein, 644 aa, Adeno-associated virus
  MOD_RES (434)..(434): Xaa = any amino acid
KAYDQQLKAGDNPYLRYNHADAEFQERLQEDTSFGGNLGRAVFQAKKRVLEPLGLVETPAKTAPGKKRPVDSPDSTSGIGKKGQQPAKKRLNFGQTGDSESVPDPQPIGEPPAGPSGLGSGTMAAGGGAPMADNNEGADGVGNASGNWHCDSTWLGDRVITTSTRTWALPTYNNHLYKQISSQSAGSTNDNVYFGYSTPWGYFDFNRFHCHFSPRDWQRLINNNWGFRPKKLNFKLFNIQVKEVTTNDGVTTIANNLTSTVQVFSDSEYQLPYVLGSAHQGCLPPFPADVFMIPQYGYLTLNNGSQSVGRSSFYCLEYFPSQMLRTGNNFTFSYTFEDVPFHSSYAHSQSLDRLMNPLIDQYLYYLARTQSNAGGTAGNRELQFYQGGPTTMAEQAKNWLPGPCFRQQRVSKTLDQNNNSNFAWTGATKYHLNXRNSLVNPGVAMATHKDDEERFFPSSGVLIFGKTGAANKTTLENVLMTNEEEIRPTNPVATEEYGIVSSNLQAASTAAQTQVVNNQGALPGMVWQNRDVYLQGPIWAKIPHTDGNFHPSPLMGGFGLKHPPPQILIKNTPVPANPPEVFTPAKFASFITQYSTGQVSVEIEWELQKENSKRWNPEIQYTSNFDKQTGVDFAVDSQGVYSEP

SEQ ID NO: 4700 - DNA, 1933 bp, Adeno-associated virus
caaggcctacgaccagcagctcaaagcgggtgacaatccgtacctgcggtataaccacgccgacgccgagtttcaggagtgtcttcaagaagatacgtcttttgggggcaacctcgggcgagcagtcttccaggccaaaaagcgggttctcgaacctcttggtctggttgagacgccagctaagacggcacctggaaagaagcgaccggtagactcgccagactccacctcgggcatcggcaagaaaggccagcagcccgcgaaaaagagactcaactttgggcagactggcgactcagagtcagtccccgaccctcaaccaatcggagaaccaccagcaggcccctctggtctgggatctggtacaatggttgcaggcggtggcgcaccaatggctgacaataacgagggcgccgacggagtgggtaatgcctcaggaaattggcattgcgattccacatggctgggcgacagagtcatcaccaccagcacccgaacctgggccctgcccacctacaacaaccacctctacaagcaaatctccagtcagtcagcagggagcaccaacgataacgtctatttcggctacagcaccccctgggggtattttgacttcaacagattccattgccacttctcaccacgtgactggcagcgacttatcaacaacaactggggattccggcccaagaagctcaacttcaagctcttcaacatccaggtcaaggaggtcacgacgaatgacggtgtcacaaccatcgctaataaccttaccagcacggttcaggtcttttcggactcggaatatcaactgccgtacgtcctcggctccgcgcaccagggctgcctgcctccgttcccggcagacgtgttcatgattccgcagtacggatacctgactctgaacaatggcagccaatcggtaggccgttcctccttctactgcctggagtactttccttctcagatgctgagaacgggcaacaacttcacctttagctacaccttcgaggacgtgcctttccacagcagctacgcgcacagccagagtctggaccggctgatgaatcccctcatcgaccagtacctgtactacttggccagaacacagagcaacgcaggaggtactgctggcaatcgggaactgcagttttatcagggcggacctaccaccatggccgaacaagcaaagaactggctgcccggaccttgcttccggcaacagagagtatccaagacgctggatcaaaataacaacagcaactttgcctggactggtgccacaaaataccatttaaatggaagaaattcattggttaatcccggtgtcgccatggcaacccacaaggacgacgaggaacgcttctccccttcgagcggagttctaatttttggcaaaactggagcagctaataaaactacattagaaaacgtgctcatgacaaatgaagaagaaattcgtcctaccaacccggtagctaccgaggaatacgggattgtaagcagcaacttgcaggcggctagcaccgcagcccagacacaagttgttaacaaccagggagccttacctggcatggtctggcagaaccgggacgtgtacctgcaaggtcccatttgggccaagattcctcacacggacggcaactttcacccgtctcctctaatgggtggctttggactgaaacacccgcctccccagatcctgatcaaaaacacgccggtacctgctaatcctccagaagtgtttactcctgccaagtttgcttccttcatcacgcagtacagcaccgggcaagtcagcgttgagatcgagtgggagctgcagaaagagaacagcaagcgctggaacccagagattcagtacacctccaactttgacaaacagactggagtggactttgctgttgacagccagggtgtttactctgagcct

SEQ ID NO: 4701 - protein, 644 aa, Adeno-associated virus
KAYDQQLKAGDNPYLRYNHADAEFQECLQEDTSFGGNLGRAVFQAKKRVLEPLGLVETPAKTAPGKKRPVDSPDSTSGIGKKGQQPAKKRLNFGQTGDSESVPDPQPIGEPPAGPSGLGSGTMVAGGGAPMADNNEGADGVGNASGNWHCDSTWLGDRVITTSTRTWALPTYNNHLYKQISSQSAGSTNDNVYFGYSTPWGYFDFNRFHCHFSPRDWQRLINNNWGFRPKKLNFKLFNIQVKEVTTNDGVTTIANNLTSTVQVFSDSEYQLPYVLGSAHQGCLPPFPADVFMIPQYGYLTLNNGSQSVGRSSFYCLEYFPSQMLRTGNNFTFSYTFEDVPFHSSYAHSQSLDRLMNPLIDQYLYYLARTQSNAGGTAGNRELQFYQGGPTTMAEQAKNWLPGPCFRQQRVSKTLDQNNNSNFAWTGATKYHLNGRNSLVNPGVAMATHKDDEERFSPSSGVLIFGKTGAANKTTLENVLMTNEEEIRPTNPVATEEYGIVSSNLQAASTAAQTQVVNNQGALPGMVWQNRDVYLQGPIWAKIPHTDGNFHPSPLMGGFGLKHPPPQILIKNTPVPANPPEVFTPAKFASFITQYSTGQVSVEIEWELQKENSKRWNPEIQYTSNFDKQTGVDFAVDSQGVYSEP

SEQ ID NO: 4702 - DNA, 1933 bp, Adeno-associated virus
caaggcctacgaccagcagctcaaagcgggtgacaatccgtacctgcggtataaccacgccgacgccgagtttcaggagcgtcttcaagaagatacgtcttttgggggcaacctcgggcgagcagtcttccaggccaaaaagcgggttctcgaacctcttggtctggttgagacgccagctaagacggcacctggaaagaagcgaccggtagactcgccagactccacctcgggcatcggcaagaaaggccagcagcccgcgaaaaagagactcaactttgggcagactggcgactcagagccagtccccgaccctcaaccaatcggagaaccaccagcaggcccctctggtctgggatctggtacaatggctgcaggcggtggcgcaccaatggctgacaataacgagggcgccgacggagtgggtaatgcctcaggaaattggcattgcgattccacacggctgggcgacagagtcatcaccaccagcacccgaacctgggccctgcccacctacaacaaccacctctacaagcaaatctccagtcagtcagcagggagcaccaacgataacgtctatttcggctacagcaccccctgggggtattttgacttcaacagattccattgccacttctcaccacgtgactggcagcgacttatcaacaacaactggggattccggcccaagaagctcaacttcaagctcttcaacatccaggtcaaggaggtcacgacgaatgacggcgtcacaaccatcgctaataaccttaccagcacggttcaggtcttttcggactcggaatatcaactgccgtacgtcctcggctccgcgcaccagggctgcctgcctccgttcccggcagacgtgttcatgattccgcagtacggatacctgactctgaacaatggcagccaatcggtaggccgttcctccttctactgcctggagtactttccttctcagatgctgagaacgggcaacaacttcacctttagctacaccttcgaggacgtgcctttccacagcagctacgcgcacagccagagtctgggccggctgatgaatcccctcatcgaccagtacctgtactacttggccagaacacagagcaacgcaggaggtactgctggcaatcgggaactgcagttttatcagggcggacctaccaccatggccgaacaagcaaagaactggctgcccggaccttgcttccggcaacagagagtatccaagacgctggatcaaaataacaacagcaactttgcctggactggtgccacaaaataccatttaaatggaagaaattcattggttaatcccggtgtcgccatggcaacccacaaggacgacgaggaacgcttcttcccttcgagcggagttctaatttttggcaaaactggagcagctaataaaactacattagaaaacgtgctcatgacaaatgaagaagaaattcgtcctaccaacccggtagctaccgaggaatacgggattgtaagcagcaacttgcaggcggctagcaccgcagcccagacacaagttgttaacaaccagggagccttacctggcatggtctggcagaaccgggacgtgtacctgcaaggtcccatttgggccaagattcctcacacggacggcaactttcacccgtctcctctaatgggtggctttggactgaaacacccgcctccccagatcctgatcaaaaacacaccggtacctgctaatcctccagaagtgtttactcctgccaagtttgcttccttcatcacgcagtacagcaccgggcaagtcagcgttgagatcgaatgggagctgcagaaagagaacagcaagcgctggaacccagagattcagtacacctccaactttgacaaacagactggagtggactttgctgttgacagccagggtgtttactctgagcct

SEQ ID NO: 4703 - protein, 644 aa, Adeno-associated virus
KAYDQQLKAGDNPYLRYNHADAEFQERLQEDTSFGGNLGRAVFQAKKRVLEPLGLVETPAKTAPGKKRPVDSPDSTSGIGKKGQQPAKKRLNFGQTGDSEPVPDPQPIGEPPAGPSGLGSGTMAAGGGAPMADNNEGADGVGNASGNWHCDSTRLGDRVITTSTRTWALPTYNNHLYKQISSQSAGSTNDNVYFGYSTPWGYFDFNRFHCHFSPRDWQRLINNNWGFRPKKLNFKLFNIQVKEVTTNDGVTTIANNLTSTVQVFSDSEYQLPYVLGSAHQGCLPPFPADVFMIPQYGYLTLNNGSQSVGRSSFYCLEYFPSQMLRTGNNFTFSYTFEDVPFHSSYAHSQSLGRLMNPLIDQYLYYLARTQSNAGGTAGNRELQFYQGGPTTMAEQAKNWLPGPCFRQQRVSKTLDQNNNSNFAWTGATKYHLNGRNSLVNPGVAMATHKDDEERFFPSSGVLIFGKTGAANKTTLENVLMTNEEEIRPTNPVATEEYGIVSSNLQAASTAAQTQVVNNQGALPGMVWQNRDVYLQGPIWAKIPHTDGNFHPSPLMGGFGLKHPPPQILIKNTPVPANPPEVFTPAKFASFITQYSTGQVSVEIEWELQKENSKRWNPEIQYTSNFDKQTGVDFAVDSQGVYSEP

SEQ ID NO: 4704 - DNA, 1933 bp, Adeno-associated virus; identical to SEQ ID NO: 4702

SEQ ID NO: 4705 - protein, 644 aa, Adeno-associated virus; identical to SEQ ID NO: 4703

SEQ ID NO: 4706 - DNA, 1933 bp, Adeno-associated virus
caaggcctacgaccagcagctcaaagcgggtgacaatccgtacctgcggtataaccacgccgacgccgagtttcaggagcgtcttcaagaagatacgtcttttgggggcaacctcgggcgagcagtcttccaggccaaaaagcgggttctcgaacctcttggtctggttgagacgccagctaagacggcacctggaaagaagcgaccggtagactcgccagactccacctcgggcatcggcaagaaaggccagcagcccgcgaaaaagagactcaactttgggcagactggcgactcagagtcagtccccgaccctcaaccaatcggagaaccaccagcaggcccctctggtctgggatctggtacaatggctgcaggcggtggcgcaccaatggctgacaatagcgagggcgccgacggagtgggtaatgcctcaggaaattggcattgcgattccacatggctgggcgacagagtcatcaccaccagcacccgaacctgggccctgcccacctacaacaaccacctctacaagcaaatctccagtcagtcagcagggagcaccaacgataacgtctatttcggctacagcaccccctgggggtattttgacttcaacagattccattgccacttctcaccacgtgactggcagcgacttatcaacaacaactggggattccggcccaagaagctcaacttcaagctcttcaacatccaggtcaaggaggtcacgacgaatgacggtgtcacaaccatcgctaataaccttaccagcacggttcaggtcttttcggactcggaatatcaactgccgtacgtcctcggctccgcgcaccagggctgcctgcctccgttcccggcagacgtgttcatgattccgcagtacggatacctgactctgaacaatggcagccaatcggtaggccgttcctccttctactgcctggagtactttccttctcagatgctgagaacgggcaacaacttcacctttagctacaccttcgaggacgtgcctttccacagcagctacgcgcacagccagagtctggaccggctgatgaatcccctcatcgaccagtacctgtactacttggccagaacacagagcaacgcaggaggtactgctggcaatcgggaactgcagttttatcagggcggacctaccaccatggccgaacaagcaaagaactggctgcccggaccttgcttccggcaacagagagtatccaagacgctggatcaaaataacaacagcaactttgcctggactggtgccacaaaataccatttaaatggaagaaattcattggttaatcccggtgtcgccatggcaacccacaaggacgacgaggaacgcttcttcccttcgagcggagttctaatttttggcaaaactggagcagctaataaaactacattagaaaacgtgctcatgacaaatgaagaagaaattcgtcctaccaacccggtagctaccgaggaatacgggattgtaagcagcaacttgcaggcggctagcaccgcagcccagacacaagttgttaacaaccagggagccttacctggcatggtctggcagaaccgggacgtgtacctgcaaggtcccatttgggccaagattcctcacacggacggcaactttcacccgtctcctctaatgggtggctttggactgaaacacccgcctccccagatcctgatcaaaaacacaccggtacctgctaatcctccagaagtgtttactcctgccaagcttgcttccttcatcacgcagtacagcaccgggcaagtcagcgttgagatcgagtgggagctgcagaaagagaacagcaagcgctggaacccagagattcagtacacctccaactttgacaaacagactggagtggactttgctgttgacagccagggtgtttactctgagcct

SEQ ID NO: 4707 - protein, 644 aa, Adeno-associated virus
KAYDQQLKAGDNPYLRYNHADAEFQERLQEDTSFGGNLGRAVFQAKKRVLEPLGLVETPAKTAPGKKRPVDSPDSTSGIGKKGQQPAKKRLNFGQTGDSESVPDPQPIGEPPAGPSGLGSGTMAAGGGAPMADNSEGADGVGNASGNWHCDSTWLGDRVITTSTRTWALPTYNNHLYKQISSQSAGSTNDNVYFGYSTPWGYFDFNRFHCHFSPRDWQRLINNNWGFRPKKLNFKLFNIQVKEVTTNDGVTTIANNLTSTVQVFSDSEYQLPYVLGSAHQGCLPPFPADVFMIPQYGYLTLNNGSQSVGRSSFYCLEYFPSQMLRTGNNFTFSYTFEDVPFHSSYAHSQSLDRLMNPLIDQYLYYLARTQSNAGGTAGNRELQFYQGGPTTMAEQAKNWLPGPCFRQQRVSKTLDQNNNSNFAWTGATKYHLNGRNSLVNPGVAMATHKDDEERFFPSSGVLIFGKTGAANKTTLENVLMTNEEEIRPTNPVATEEYGIVSSNLQAASTAAQTQVVNNQGALPGMVWQNRDVYLQGPIWAKIPHTDGNFHPSPLMGGFGLKHPPPQILIKNTPVPANPPEVFTPAKLASFITQYSTGQVSVEIEWELQKENSKRWNPEIQYTSNFDKQTGVDFAVDSQGVYSEP

SEQ ID NO: 4708 - DNA, 1933 bp, Adeno-associated virus
caaggcctacgaccagcagctcaaagcgggtgacaatccgtacctgcggtataaccacgccgacgccgagtttcaggagcgtcttcaagaagatacgtcttttgggggcaacctcgggcgagcagtcttccaggccaaaaagcgggttctcgaacctcttggtctggttgagacgccagctaagacggcacctggaaagaagcgaccggtagactcgccagactccacctcgggcatcggcaagaaaggccagcagcccgcgaaaaagagactcaactttgggcagactggcgactcagagtcagtccccgaccctcaaccaatcggagaaccaccagcaggcccctctggtctgggatctggtacaatggctgcaggcggtggcgcaccaatggctgacaataacgagggcgccgacggagtgggtaatgcctcaggaaattggcattgcgattccacatggctgggcgacagagtcatcaccaccagcacccgaacctgggccctgcccacctacaacaaccacctctacaagcaaatctccagtcagtcagcagggagcaccaacgataacgtctatttcggctacagcaccccctgggggtattttgacttcaacagattccattgccacttctcaccacgtgactggcagcgacttatcaacaacaactggggattccggcccaagaagctcaacttcaagctcttcaacatccaggtcaaggaggtcacgacgaatgacggcgtcacaaccatcgctaataaccttaccagcacggttcaggtcttttcggacccggaatatcaactgccgtacgtcctcggctccgcgcaccagggctgcctgcctccgttcccggcagacgtgttcatgattccgcagtacggatacctgactctgaacaatggcagccaatcggtaggccgttcctccttctactgcctggagtactttccttctcagatgctgagaacgggcaacaacttcacctttagctacaccttcgaggacgtgcctttccacagcagctacgcgcacagccagagtctggaccggctgatgaatcccctcatcgaccagtacctgtactacttggccagaacacagagcaacgcaggaggtactgctggcaatcgggaactgcagttttatcagggcggacctaccaccatggccgaacaagcaaagaactggctgcccggaccttgcttccggcaacagagagtatccaagacgctggatcaaaataacaacagcaactttgcctggactggtgccacaaaataccatttaaatggaagaaattcattggttaatcccggtgtcgccatggcaacccacaaggacgacgaggaacgcttcttcccttcgagcggagttctaatttttggcaaaactggagcagctaataaaactacattagaaaacgtgctcatgacaaatgaagaagaaattcgtcctaccaacccggtagctaccgaggaatacgggattgtaagcagcaacttgcaggcggctagcaccgcagcccagacacaagttgttaacaaccagggagccttacctggcatggtctggcagaaccgggacgtgtacctgcaaggtcccatttgggccaagattcctcacacggacggcaactttcacccgtctcctctaatgggtggctttggactgaaacacccgcctccccagatcctgatcaaaaacacaccggtacctgctaatcctccagaagtgtttactcctgccaagattgcttccttcatcacgcagtacagcaccgggcaagtcagcgttgagatcgagtgggagctgcagaaagagaacagcaagcgctggaacccagagattcagtacacctccaactttgacaaacagactggagtggactttgctgttgacagccagggtgtttactctgagcct

SEQ ID NO: 4709 - protein, 644 aa, Adeno-associated virus
KAYDQQLKAGDNPYLRYNHADAEFQERLQEDTSFGGNLGRAVFQAKKRVLEPLGLVETPAKTAPGKKRPVDSPDSTSGIGKKGQQPAKKRLNFGQTGDSESVPDPQPIGEPPAGPSGLGSGTMAAGGGAPMADNNEGADGVGNASGNWHCDSTWLGDRVITTSTRTWALPTYNNHLYKQISSQSAGSTNDNVYFGYSTPWGYFDFNRFHCHFSPRDWQRLINNNWGFRPKKLNFKLFNIQVKEVTTNDGVTTIANNLTSTVQVFSDPEYQLPYVLGSAHQGCLPPFPADVFMIPQYGYLTLNNGSQSVGRSSFYCLEYFPSQMLRTGNNFTFSYTFEDVPFHSSYAHSQSLDRLMNPLIDQYLYYLARTQSNAGGTAGNRELQFYQGGPTTMAEQAKNWLPGPCFRQQRVSKTLDQNNNSNFAWTGATKYHLNGRNSLVNPGVAMATHKDDEERFFPSSGVLIFGKTGAANKTTLENVLMTNEEEIRPTNPVATEEYGIVSSNLQAASTAAQTQVVNNQGALPGMVWQNRDVYLQGPIWAKIPHTDGNFHPSPLMGGFGLKHPPPQILIKNTPVPANPPEVFTPAKIASFITQYSTGQVSVEIEWELQKENSKRWNPEIQYTSNFDKQTGVDFAVDSQGVYSEP

SEQ ID NO: 4710 - protein, 728 aa, Adeno-associated virus
MAADGYLPDWLEDNLSEGIREWWDLKPGAPKPKANQQKQDDGRGLVLPGYKYLRPFNGLDKGEPVNEADAAALEHDKAYDKQLEQGDNPYLKYNHADAEFQERLQEDTSFGGNLGRAVFQAKKRVLEPLGLVEEVAKTAPGKKRPIESPDSSTGIGKKGQQPAKKKLNFGQTGDSESVPDPQPLGEPPAAPSGLGSGTMAAGGGAPMADNNEGADGVGNASGNWHCDSTWLGDRVITTSTRTWALPTYNNHLYKQISSQSGATNDNHFFSYSTPWGYFDFNRFHCHFSPRDWQRLINNNWGFRPRKLRFKLFNIQVKEVTTNDGVTTIANNLTSTIQVFSDSEYQLPYVLGSAHQGCLPPFPADVFMIPQYGYLTLNNGSQSVGRSSFYCLEYFPSQMLRTGNNFEFSYTFEEVPFHSSYVHSQSLDRLMNPLIDQYLYYLARTQSTTGSTRELQFHQAGPNTMAEQSKNWLPGPCYRQQRLSKNIDSNNNSNFAWTGATKYHLNGRNSLTNPGVAMATNKDDEDQFFPINGVLVFGKTGAANKTTLENVLMTSEEEIKTTNPVATEEYGVVSSNLQSSTAGPQTQTVNSQGALPGMVWQNRDVCLQGPIWAKIPHTDGNFHPSPLMGGFGLKHPPPQILIKNTPVPANPPEVFTPAKFASFITQYSTGQVSVEIEWELQKENSKRWNPEIQYTSNYAKSNNVEFAVNNEGVYTEPRPIGTRYLTRNL

SEQ ID NO: 4711 - protein, 728 aa, Adeno-associated virus
MAADGYLPDWLEDNLSEGIREWWDLKPGAPKPKANQQKQDDGRGLVLPGYKYLGPFNGLDKGEPVNEADAAALEHDKAYDKQLEQGDNPYLKYNHADAEFQERLQEDTSFGGNLGRAVFQAKKRVLEPLGLVEEGAKTASGKKRPIESPDSSTGIGKKGQQPAKKKLNFGQTGDSESVPDPQPLGEPPAAPSGLGSGTMAAGGGAPMADNNEGADGVGNASGNWHCDSTWLGDRVITTSTRTWALPTYNNHLYKQISSQSGATNDNHFFGYSTPWGYFDFNRFHCHFSPRDWQRLINNNWGFRPRKLRFKLFNIQVKEVTTNDGVTTIANNLTSTIQVFSDSEYQLPYVLGSAHQGCLPPFPADVFMIPQYGYLTLNNGSQSVGRSSFCCLEYFPSQMLRTGNNFEFSYTFEEVPFHSSYAHSQSLDRLMNPLIDQYLYYLARTQSTTGSTRELQFHQAGPNTVAEQSKNWLPGPCYRQQRLSKNIDSNNNSNFAWTGATKYHLNGRNSLTNPGVAMATNKDDEDQFLPINGVLVFGKTGAANKTTLENVLMTSEEEIKTTNPVATEEYGVVSSNLQSSTAGPRTQTVNSQGALPGMVWQNRDVYLQGPIWAEIPHTDGNFHPSPLMGGFGLKHPPPQILIKNTPVPANPPEVFTPAKFASFITQYSTGQVSVEIEWELQKENSKRWNPEIQYTSNYAKSNNVEFAVNNEGVYTEPRPIGTRYLTRNL

SEQ ID NO: 4712 - protein, 738 aa, Adeno-associated virus
MAADGYLPDWLEDNLSEGIREWWALKPGAPKPKANQQKQDDGRGLVLPGYKYLGPFNGLDKGEPVNAADAAALEHDKAYDQQLKAGDNPYLRYNHADAEFQERLQEDTSFGGNLGRAVFQAKKRVLEPLGLVEEGAKTAPGKKRPVEPSPQRSPDSTTGIGKKGQQPAKKRLNFGQTGDSESVPDPQPIGEPPAGPSGLGSGTMAAGGGAPMADNNEGADGVGSSSGNWHCDSTWLGDRVITTSTRTWALPTYNNHLYKQISNGTSGGSTNDNTYFGYSTPWGYFDFNRFHCHFSPRDWQRLINNNWGFRPKRLNFKLFNIQVKEVTQNEGTKTIANNLTSTIQVFTDSEYQLPYVLGSARQGCLPPFPADVFMIPQYGYLTLNNGSQAVGRSSFYCLEYFPSQMLRTGNNFEFSYQFEDVPFHSSYAHSQSLDRLMNPLIDQYLYYLSRTQSTGGTAGTQQLLFSQAGPNNMSAQAKNWLPGPCYRQQRVSTTLSQNNNSNFAWTGATKYHLNGRDSLVNPGVAMATHKDDEERFFPSSGVLMFGKQGAGKGNVDYSSVMLTSEEEIKTTNPVATEQYGVVADNLQQQNAAPIVGAVNSQGALPGMVWQNRDVYLQGPIWAKIPHTDGNFHPSPLMGGFGLKHPPPQILIKNTPVPADPPTTFSQAKLASFITQYSTGQVSVEIEWELQKENSKRWNPEIQYTSNYYKSTNVDFAVNTDGTYSEPRPIGTRYLTRNL

SEQ ID NO: 4713 - DNA, 3121 bp, Adeno-associated virus
gaattcgcccttcgcagagaccaaagttcaactgaaacgaatcaaccggtttattgattaacaagcaattacagattacgggtgaggtaacgggtgccgatggggcgaggctcagaataagtgccatctgtgttaacagcaaagtccacatttgtagatttgtagtagttggaagtgtattgaatctctgggttccagcgtttgctgttttctttctgcagctcccattcaatttccacgctgacctgtccggtgctgtactgcgtgatgaacgacgccagcttagcttgactgaaggtagttggaggatccgcgggaacaggtgtattcttaatcaggatctgaggaggcgggtgtttcagtccaaagccccccatcagcggcgagggatgaaagtttccgtccgtgtgaggaatcttggcccagataggaccctgcaggtacacgtcccggttctgccagaccatgccaggtaaggctccttgactgttgacggcccctacaataggagcggcgttttgctgttgcaggttatcggccaccacgccgtactgttctgtggccactgggttggtggttttaatttcttcctcactggttagcataacgctgctatagtccacgttgccttttccagctccctgtttcccaaacattaagactccgctggacggaaaaaatcgctcttcgtcgtccttgtgggttgccatagcgacaccgggatttaccagagagtctctgccattcagatgatacttggtggcaccggtccaggcaaagttgctgttgttattttgcgacagtgtcgtggagacgcgttgctgccggtagcagggcccgggtagccagtttttggcctgagccgacatgttattaggcccggcctgagaaaatagcaactgctgagttcctgcggtacctcccgtggactgagtccgagacaggtagtacaggtactggtcgatgagggggttcatcagccggtccaggctttggctgtgcgcgtagctgctgtgaaaaggcacgtcctcaaactggtagctgaactcaaagttgttgcccgttctcagcatttgagaaggaaagtactccaggcagtagaaggaggaacggcccacggcctgactgccattgttcagagtcaggtacccgtactgaggaatcatgaagacgtccgccgggaacggaggcaggcagccctggcgcgcagagccgaggacgtacgggagctggtattccgagtccgtaaagacctgaatcgtgctggtaaggttattggcgatggtcttggtgccttcattctgcgtgacctccttgacctggatgttgaagagcttgaagttgagtctcttgggccggaatccccagttgttgttgatgagtcgctgccagtcacgtggtgagaagtggcagtggaatctgttaaagtcaaaatacccccagggggtgctgtagccgaagtaggtgttgtcgttggtgcttcctcccgaagtcccgttggagatttgcttgtagaggtggttgttgtaggtggggagggcccaggttcgggtgctggtggtgatgactctgtcgcccagccatgtggaatcgcaatgccaatttcctgaggaactacccactccgtcggcgccttcgttattgtctgccattggagcgccaccgcctgcagccattgtaccagatcccagaccagaggggcctgcggggggttctccgattggttgagggtcgggcactgactctgagtcgccagtctgcccaaagttgagtctctttttcgcgggctgctggcctttcttgccgatgcccgtagtggagtctggagaacgctggggtgatggctctaccggtctcttctttccaggagccgtcttagcgccttcctcaaccagaccgagaggttcgagaacccgcttcttggcctggaagactgctcgtccgaggttgcccccaaaagacgtatcttcttgcagacgctcctgaaactcggcgtcggcgtggttataccgcaggtacggattgtcacccgctttgagctgctggtcgtaggccttgtcgtgctcgagggccgctgcgtccgccgcgttgacgggctcccccttgtcgagtccgttgaagggtccgaggtacttgtagccaggaagcaccagaccccggccgtcgtcctgcttttgctggttggctttgggcttcggggctccaggtttcagcgcccaccactcgcgaatgccctcagagaggttgtcctcgagccaatctggaagataaccatcggcagccatacctgatctaaatcatttattgttcaaagatgcagtcatccaaatccacattgaccagatcgcaggcagtgcaagcgtctggcacctttcccatgatatgatgaatgtagcacagtttctgatacgcctttttgacgacagaaacgggttgagattctgacacgggaaagcactctaaacagtctttctgtccgtgagtgaagcagatatttgaattctgattcattctctcgcattgtctgcagggaaacagcatcagattcatgcccacgtgacgagaacatttgttttggtacctgtccgcgtagttgatcgaagcttccgcgtctgacgtcgatggctgcgcaactgactcgcgcacccgtttgggctcacttatatctgcgtcactgggggcgggtcttttcttggctccaccctttttgacgtagaattcatgctccacctcaaccacgtgatcctttgcccaccggaaaaagtctttgacttcctgcttggtgaccttcccaaagtcatgatccagacggcgggtgagttcaaatttgaacatccggtcttgcaacggctgctggtgttcgaaggtcgttgagttcccgtcaatcacggcgcacatgttggtgttggaggtgacgatcacgggagtcgggtctatctgggccgaggacttgcatttctggtccacgcgcaccttgcttcctccgagaatggctttggccgactccacgaccttggcggtcatcttcccctcctcccaccagatcaccatcttgtcgacacagtcgttgaagggaaagttctcattggtccagttgacgcagccgtagaagggcgaattc

SEQ ID NO: 4714 - DNA, 3121 bp, Adeno-associated virus
gaattcgcccttctacggctgcgtcaactggaccaatgagaactttcccttcaacgactgtgtcgacaagatggtgatctggtgggaggaggggaagatgaccgccaaggtcgtggagtcggccaaagccattctcggaggaagcaaggtgcgcgtggaccagaaatgcaagtcctcggcccagatagacccgactcccgtgatcgtcacctccaacaccaacatgtgcgccgtgattgacgggaactcaacgaccttcgaacaccagcagccgttgcaagaccggatgttcaaatttgaactcacccgccgtctggatcatgactttgggaaggtcaccaagcaggaagtcaaagactttttccggtgggcaaaggatcacgtggttgaggtggagcacgaattctacgtcaaaaagggtggagccaagaaaagacccgcccccagtgacgcagatataagtgagcccaaacgggtgcgcgagtcagttgcgcagccatcgacgtcagacgcggaagcttcgatcaactacgcagacaggtaccaaaacaaatgttctcgtcacgcgggcatgaatctgatgctgtttccctgcagacaatgcgagagaatgaatcagaattcaaatatctgcttcactcacggacagaaagactgtttagagtgctttcccgtgtcagaatctcaacccgtttctgtcgtcaaaaaggcgtatcagaaactgtgctacattcatcatatcatgggaaaggtgccagacgcttgcactgcctgcgatctggtcgatgtggatttggatgactgcatctttgaacaataaatgatttaaatcaggtatggctgccgatggttatcttccagattggctcgaggacaacctctctgagggcattcgcgagtggtgggcgctgaaacctggagccccgaagcccaaagccaaccagcaaaagcaggacggcggccggggtctggtgcttcctggctacaagtacctcggacccttcaacggactcgacaagggggagcccgtcaacgcggcggacgcagcggccctcgagcacgacaaggcctacgaccagcagctcaaagcgggtgacaatccgtacctgcggtataaccacgccgacgccgagtttcaggagcgtctgcaagaagatacgtcttttgggggcaacctcgggcgagcagtcttccaggccaagaagcgggttctcgaacctctcggtctggttgaggaaggcgctaagacggctcctggaaagaagagaccggtagagccatcaccccagcgttctccagactcctctacgggcatcggcaagaaaggccagcagcccgcgaaaaagagactcaactttgggcagactggcgactcagagtcagtgcccgaccctcaaccaatcggagaaccccccgcaggcccctctggtctgggatctggtacaatggctgcaggcggtggcgctccaatggcagacaataacgaaggcgccgacggagtgggtagttcctcaggaaattggcattgcgattccacatggctgggcgactgagtcatcaccaccagcacccgaacctgggccctccccacctacaacaaccacctctacaagcaaatctccaacgggacttcgggaggaagcaccaacgacaacacctacttcggctacagcaccccctgggggtattttgactttaacagattccactgccacttctcaccacgtgactggcagcgactcatcaacaacaactggggattccggcccaagagactcaacttcaagctcttcaacatccaggtcaaggaggtcacgcagaatgaaggcaccaagaccatcgccaataaccttaccagcacgattcaggtctttacggactcggaataccagctcccgtacgtcctcggctctgcgcaccagggctgcctgcctccgttcccggcggacgtcttcatgattcctcagtacgggtacctgactctgaacaatggcagtcaggccgtgggccgttcctccttctactgcctggagtactttccttctcaaatgctgagaacgggcaacaactttgagttcagctaccagtttgaggacgtgccttttcacagcagctacgcgcacagccaaagcctggaccggctgatgaaccccctcatcgaccagtacctgtactacctgtctcggactcagtccacgggaggtaccgcaggaactcagcagttgctattttctcaggccgggcctaataacatgtcggctcaggccaaaaactggctacccgggccctgctaccggcagtaacgcgtctccacgacactgtcgcaaaataacaacagcaactttgtctggaccggtgccaccaagtatcatctgaatggcagagactctctggtagatcccggtgtcgctatggcaacccacaaggacgacgaagagcgattttttccgtccagcggagtcataatgtttgggaaacagggagctggaaaagacaacgtggactatagcagcgtcatgctaaccagtgaggaagaaattaaaaccaccaacccagtggccacagaacagtacggcgtggtggccgataacctgcaacagcaaaacgccgctcctattgtaggggccgtcaacagtcaaggagccttacctggcatggtctggcagaaccgggacgtgtacctgcagggtcctacctgggccaagattcctcacacggacggaaactttcatccctcgccgctgatgggaggctttggactgaaacacccgcctcctcagatcctgattaagaatacacctgttcccgcggatcctccaactaccttcagtcaagctaagctggcgtcgttcatcacgcagtacagcaccggacaggtcagcgtggaaattgaatgggagctgcaggaagaaaacagcaaacgctggaacccagagattcaatacacttccaactactacaaatctacaaatgtggactttgctgttaacacagatggcacttattctgagcctcgccccatcggcacccgttacctcacccgtaatctgtaattgcttgttaatcaataaaccggttgattcgtttcagttgaactttggtctctgcgaagggcgaattc

SEQ ID NO: 4715 - protein, 738 aa, Adeno-associated virus
MAADGYLPDWLEDNLSEGIREWWALKPGAPKPKANQQKQDDGRGLVLPGYKYLGPFNGLDKGEPVNAADAAALEHDKAYDQQLKAGDNPYLRYNHADAEFQERLQEDTSFGGNLGRAVFQAKKRVLEPLGLVEEGAKTAPGKKRPVEPSPQRSPDSSTGIGKKGQQPAKKRLNFGQTGDSESVPDPQPIGEPPAGPSGLGSGTMAAGGGAPMADNNEGADGVGSSSGNWHCDSTWLGDGVITTSTRTWALPTYNNHLYKQISNGTSGGSTNDNTYFGYSTPWGYFDFNRFHCHFSPRDWQRLINNNWGFRPKSLNFKLFNIQVKEVTQNEGTKTIANNLTSTIQVFTDSEYQLPYVLGSAHQGCLPPFPADVFMIPQYGYLTLNNGSQAVGRSSFYCLEYFPSQMLRTGNNFEFSYQFEDVPFHSSYAHSQSLDRLMNPLIDQYLYYLSRTQSTGGTAGTQQLLFSQAGPNNMSAQAKNWLPGPCYRQQRVSTTLSQNDNSNFAWTGATKYHLNGRDSLVNPGVAMATHKDDEERFFPSSGVLMFGKQGAGKDNVDYSSVMLTSEEEIKTTNPVATEQYGVVADNLQQQNAAPIVGAVNSQGALPGMVWQNRDVYLQGPIWAKIPHTDGNFHPSPLMGGFGLKHPPPQILIKNTPVPADPPTTFSQAKLASFITQYSTGQVSVEIEWELQKENSKRWNPEIQYTSNYYKSTNVDFAVNTDGTYSEPRPIGTRYLTRNL

SEQ ID NO: 4716 - DNA, 3121 bp, Adeno-associated virus
gaattcgcccttcgcgagaccaaagttcaactgaaacgaatcaaccggtttattgattaacaagcaattacagattacgggtgaggtaacgggtgccgatggggcgaggctcagaataagtgccatctgtgttaacagcaaagtccacatttgtagatttgtagtagttggaagtgtattgaatctctgggttccagcgtttgctgttttctttctgcagctcccattcaatttccacgctgacctgtccggtgctgtactgcgtgatgaacgacgccagcttagcttgactgaaggtagttggaggatccgcgggaacaggtgtattcttaatcaggatctgaggaggcgggtgtttcagtccaaagcctcccatcagcggcgagggatgaaagtttccgtccgtgtgaggaatcttggcccagataggaccctgcaggtacacgtcccggttctgccagaccatgccaggtaaggctccttgactgttgacggcccctacaataggagcggcgttttgctgttgcaggttatcggccaccacgccgtactgttctgtggccactgggttggtggttttaatttcttcctcactggttagcataacgctgctatagtccacgttgtcttttccagctccctgtttcccaaacattaagactccgctggacggaaaaaatcgctcttcgtcgtccttgtgggttgccatagcgacaccgggatttaccagagagtctctgccattcagatgatacttggtggcaccggtccaggcaaagttgctgttgtcattttgcgacagtgtcgtggagacgcgttgctgccggtagcagggcccgggtagccagtttttggcctgagccgacatgttattaggcccggcctgagaaaatagcaactgctgagttcctgcggtacctcccgtggactgagtccgagacaggtagtacaggtactggtcgatgagggggttcatcagccggtccaggctttggctgtgcgcgtagctgctgtgaaaaggcacgtcctcaaactggtagctgaactcaaagttgttgcccgttctcagcatttgagaaggaaagtactccaggcagtagaaggaggaacggcccacggcctgactgccattgttcagagtcaggtacccgtactgaggaatcatgaagacgtccgccgggaacggaggcaggcagccctggtgcgcagagccgaggacgtacgggagctggtattccgagtccgtaaagacctgaatcgtgctggtaaggttattggcgatggtcttggtgccttcattctgcgtgacctccttgacctggatgttgaagagcttgaagttgaggctcttgggccggaatccccagttgttgttgatgagtcgctgccagtcacgtggtgagaagtggcagtggaatctgttaaagtcaaaatacccccagggggtgctgtagccgaagtaggtgttgtcgttggtgcttcctcccgaagtcccgttggagatttgcttgtagaggtggttgttgtaggtggggagggcccaggttcgggtgctggtggtgatgactccgtcgcccagccatgtggaatcgcaatgccaatttcctgaggaactacccactccgtcggcgccttcgttattgtctgccattggagcgccaccgcctgcagccattgtaccagatcccagaccagaggggcctgcggggggttctccgattggttgagggtcgggcactgactctgagtcgccagtctgcccaaagttgagtctctttttcgcgggctgctggcctttcttgccgatgcccgtagaggagtctggagaacgctggggtgatggctctaccggtctcttctttccaggagccgtcttagcgccttcctcaaccagaccgagaggttcgagaacccgcttcttggcctggaagactgctcgcccgaggttgcccccaaaagacgtatcttcttgcagacgctcctgaaactcggcgtcggcgtggttataccgcaggtacggattgtcacccgctttgagctgctggtcgtaggccttgtcgtgctcgagggccgctgcgtccgccgcgttgacgggctcccccttgtcgagtccgttgaagggtccgaggtacttgtagccaggaagcaccagaccccggccgtcgtcctgcttttgctggttggctttgggcttcggggctccaggtttcagcgcccaccactcgcgaatgccctcagagaggttgtcctcgagccaatctggaagataaccatcggcagccatacctgatttaaatcatttattgttcaaagatgcagtcatccaaatccacattgaccagatcgcaggcagtgcaagcgtctggcacctttcccatgatatgatgaatgtagcacagtttctgatacgcctttttgacgacagaaacgggttgagattctgacacgggaaagcactctaaacagtctttctgtccgtgagtgaagcagatatttgaattctgattcattctctcgcattgtctgcagggaaacagcatcagattcatgcccacgtgacgagaacatttgttttggtacctgtctgcgtagttgatcgaagcttccgcgtctgacgtcgatggctgcgcaactgactcgcgcacccgtttgggctcacttatatctgcgtcactgggggcgggtcttttcttggctccaccctttttgacgtagaattcatgctccacctcaaccacgtgatcctttgcccaccggaaaaagtctttgacttcctgcttggtgaccttcccaaagtcatgatccagacggcgggtgagttcaaatttgaacatccggtcttgcaacggctgctggtgttcgaaggtcgttgagttcccgtcaatcacggcgcacatgttggtgttggaggtgacgatcacgggagtcgggtctatctgggccgaggacttgcatttctggtccacgcgcaccttgcttcctccgagaatggctttggccgactccacgaccttggcggtcatcttcccctcctcccaccagatcaccatcttgtcgacacagtcgttgaagggaaagttctcattggtccagttgacgcagccgtagaaagggcgaattc

SEQ ID NO: 4717 - DNA, 2211 bp, Adeno-associated virus
atggctgctgacggttatcttccagattggctcgaggacaacctttctgaaggcattcgtgagtggtgggctctgaaacctggagtccctcaacccaaagcgaaccaacaacaccaggacaaccgtcggggtcttgtgcttccgggttacaaatacctcggacccggtaacggactcgacaaaggagagccggtcaacgaggcggacgcggcagccctcgaacacgacaaagcttacgaccagcagctcaaggccggtgacaacccgtacctcaagtacaaccacgccgacgccgagtttcaggagcgtcttcaagaagatacgtcttttgggggcaaccttggcagagcagtcttccaggccaaaaagaggatccttgagcctcttggtctggttgaggaagcagctaaaacggctcctggaaagaagggggctgtagatcagtctcctcaggaaccggactcatcatctggtgttggcaaatcgggcaaacagcctgccagaaaaagactaaatttcggtcagactggagactcagagtcagtcccagaccctcaacctctcggagaaccaccagcagcccccacaagtttgggatctaatacaatggcttcaggcggtggcgcaccaatggcagacaataacgagggtgccgatggagtgggtaattcctcaggaaattggcattgcgattcccaatggctgggcgacagagtcatcaccaccagcaccagaacctgggccctgcccacttacaacaaccatctctacaagcaaatctccagccaatcaggagcttcaaacgacaaccactactttggctacagcaccccttgggggtattttgactttaacagattccactgccacttctcaccacgtgactggcagcgactcattaacaacaactggggattccggcccaagaaactcagcttcaagctcttcaacatccaagttagaggggtcacgcagaacgatggcacgacgactattgccaataaccttaccagcacggttcaagtgtttacggactcggagtatcagctcccgtacgtgctcgggtcggcgcaccaaggctgtctcccgccgtttccagcggacgtcttcatggtccctcagtatggatacctcaccctgaacaacggaagtcaagcggtgggacgctcatccttttactgcctggagtacttcccttcgcagatgctaaggactggaaataacttccaattcagctataccttcgaggatgtaccttttcacagcagctacgctcacagccagagtttggatcgcttgatgaatcctcttattgatcagtatctgtactacctgaacagaacgcaaggaacaacctctggaacaaccaaccaatcacggctgctttttagccaggctgggcctcagtctatgtctttgcaggccagaaattggctacctgggccctgctaccggcaacagagactttcaaagactgctaacgacaacaacaacagtaactttccttggacagcggccagcaaatatcatctcaatggccgcgactcgctggtgaatccaggaccagctatggccagtcacaaggacgatgaagaaaaatttttccctatgcacggcaatctaatatttggcaaagaagggacaacggcaagtaacgcagaattagataatgtaatgattacggatgaagaagagattcgtaccaccaatcctgtggcaacagagcagtatggaactgtggcaaataacttgcagagctcaaatacagctcccacgactggaactgtcaatcatcagggggccttacctggcatggtgtggcaagatcgtgacgtgtaccttcaaggacctatctgggcaaagattcctcacacggatggacactttcatccttctcctctgatgggaggctttggactgaaacatccgcctcctcaaatcatgatcaaaaatactccggtaccggcaaatcctccgacgactttcagcccggccaagtttgcttcatttatcactcagtactccactggacaggtcagcgtggaaattgagtgggagctacagaaagaaaacagcaaacgttggaatccagagattcagtacacttccaactacaacaagtctgttaatgtggactttactgtagacactaatggtgtttatagtgaacctcgccctattggaacccggtatctcacacgaaacttgtga

SEQ ID NO: 4718 - protein, 737 aa, Adeno-associated virus
MAADGYLPDWLEDNLSEGIREWWDLKPGAPKPKANQQKQDNGRGLVLPGYKYLGPFNGLDKGEPVNAADAAALEHDKAYDQQLNAGDNPYLRYNHADAEFQERLQEDTSFGGNLGRAVFQAKKRVLEPLGLVEEGAKTAPAKKRPVEPSPQRSPDSSTGIGKKGQQPARKRLNFGQTGDSESVPDPQPLGEPPAAPSSVGSGTVAAGGGAPMADNNEGADGVGNASGNWHCDSTWLGDRVITTSTRTWALPTYNNHLYEQISSETAGSTNDNTYFGYSTPWGYFDFNRFHCHFSPRDWQRLINNNWGFRPKKLRFKLFNIQVKEVTTNDGVTTIANNLTSTIQVFSDSEYQLPYVLGSAHQGCLPPFPADVFMIPQYGYLTLNNGSQSVGRSSFYCLEYFPSQMLRTGNNFEFSYSFEDVPFHSSYAHSQSLDRLMNPLIDQYLYYLARTQSDPGGTAGNRELQFYQGGPSTMAEQAKNWLPGPCFRQQRVSKTLDQNNNSNFAWTGATKYHLNGRNSLVNPGVAMATHKDDEDRFFPSSGVLIFGKTGATNKTTLENVLMTNEEEIRPTNPVATEEYGIVSSNLQAANTAAQTQVVNNQGALPGMVWQNRDVYLQGPIWAKIPHTDGNFHPSPLMGGFGLKHPPPQILIKNTPVPANPPEVFTPAKFASFITQYSTGQVSVEIEWELQKENSKRWDPEIQYTSNFEKQTGVDFAVDSQGVYSEPRPIGTRYLTRNL

SEQ ID NO: 4719 - DNA, 2211 bp, Adeno-associated virus
atggctgctgacggttatcttccagattggctcgaggacaacctttctgaaggcattcgtgagtggtgggctctgaaacctggagtccctcaacccaaagcgaaccaacaacaccaggacaaccgtcggggtcttgtgcttccgggttacaaatacctcggacccggtaacggactcgacaaaggagagccggtcaacgaggcggacgcggcagccctcgaacacgacaaagcttacgaccagcagctcaaggccggtgacaacccgtacctcaagtacaaccacgccgacgccgagtttcaggagcgtcttcaagaagatacgtcttttgggggcaaccttggcagagcagtcttccaggccaaaaagaggatccttgagcctcttggtctggttgaggaagcagctaaaacggctcctggaaagaagggggctgtagatcagtctcctcaggaaccggactcatcatctggtgttggcaaatcgggcaaacagcctgccagaaaaagactaaatttcggtcagactggagactcagagtcagtcccagaccctcaacctctcggagaaccaccagcagcccccacaagtttgggatctaatacaatggcttcaggcggtggcgcaccaatggcagacaataacgagggtgccgatggagtgggtaattcctcaggaaattggcattgcgattcccaatggctgggcgacagagtcatcaccaccagcaccagaacctgggccctgcccacttacaacaaccatctctacaagcaaatctccagccaatcaggagcttcaaacgacaaccactactttggctacagcaccccttgggggtattttgactttaacagattccactgccacttctcaccacgtgactggcagcgactcattaacaacaactggggattccggcccaagaaactcagcttcaagctcttcaacatccaagttagaggggtcacgcagaacgatggcacgacgactattgccaataaccttaccagcacggttcaagtgtttacggactcggagtatcagctcccgtacgtgctcgggtcggcgcaccaaggctgtctcccgccgtttccagcggacgtcttcatggtccctcagtatggatacctcaccctgaacaacggaagtcaagcggtgggacgctcatccttttactgcctggagtacttcccttcgcagatgctaaggactggaaataacttccaattcagctataccttcgaggatgtaccttttcacagcagctacgctcacagccagagtttggatcgcttgatgaatcctcttattgatcagtatctgtactacctgaacagaacgcaaggaacaacctctggaacaaccaaccaatcacggctgctttttagccaggctgggcctcagtctatgtctttgcaggccagaaattggctacctgggccctgctaccggcaacagagactttcaaagactgctaacgacaacaacaacagtaactttccttggacagcggccagcaaatatcatctcaatggccgcgactcgctggtgaatccaggaccagctatggccagtcacaaggacgatgaagaaaaatttttccctatgcacggcaatctaatatttggcaaagaagggacaacggcaagtaacgcagaattagataatgtaatgattacggatgaagaagagattcgtaccaccaatcctgtggcaacagagcagtatggaactgtggcaaataacttgcagagctcaaatacagctcccacgactggaactgtcaatcatcagggggccttacctggcatggtgtggcaagatcgtgacgtgtaccttcaaggacctatctgggcaaagattcctcacacggatggacactttcatccttctcctctgatgggaggctttggactgaaacatccgcctcctcaaatcatgatcaaaaatactccggtaccggcaaatcctccgacgactttcagcccggccaagtttgcttcatttatcactcagtactccactggacaggtcagcgtggaaattgagtgggagctacagaaagaaaacagcaaacgttggaatccagagattcagtacacttccaactacaacaagtctgttaatgtggactttactgtagacactaatggtgtttatagtgaacctcgccctattggaacccggtatctcacacgaaacttgtaa

SEQ ID NO: 4720 - protein, 736 aa, Adeno-associated virus
MAADGYLPDWLEDNLSEGIREWWALKPGVPQPKANQQHQDNRRGLVLPGYKYLGPGNGLDKGEPVNEADAAALEHDKAYDQQLKAGDNPYLKYNHADAEFQERLQEDTSFGGNLGRAVFQAKKRILEPLGLVEEAAKTAPGKKGAVDQSPQEPDSSSGVGKSGKQPARKRLNFGQTGDSESVPDPQPLGEPPAAPTSLGSNTMASGGGAPMADNNEGADGVGNSSGNWHCDSQWLGDRVITTSTRTWALPTYNNHLYKQISSQSGASNDNHYFGYSTPWGYFDFNRFHCHFSPRDWQRLINNNWGFRPKKLSFKLFNIQVRGVTQNDGTTTIANNLTSTVQVFTDSEYQLPYVLGSAHQGCLPPFPADVFMVPQYGYLTLNNGSQAVGRSSFYCLEYFPSQMLRTGNNFQFSYTFEDVPFHSSYAHSQSLDRLMNPLIDQYLYYLNRTQGTTSGTTNQSRLLFSQAGPQSMSLQARNWLPGPCYRQQRLSKTANDNNNSNFPWTAASKYHLNGRDSLVNPGPAMASHKDDEEKFFPMHGNLIFGKEGTTASNAELDNVMITDEEEIRTTNPVATEQYGTVANNLQSSNTAPTTGTVNHQGALPGMVWQDRDVYLQGPIWAKIPHTDGHFHPSPLMGGFGLKHPPPQIMIKNTPVPANPPTTFSPAKFASFITQYSTGQVSVEIEWELQKENSKRWNPEIQYTSNYNKSVNVDFTVDTNGVYSEPRPIGTRYLTRNL

SEQ ID NO: 4721 - protein, 728 aa, Adeno-associated virus
MAADGYLPDWLEDNLSEGIREWWDLKPGAPKPKANQQKQDDGRGLVLPGYKYLGPFNGLDKGEPVNEADAAALEHDKAYDKQLEQGDNPYLKYNHADAEFQERLQEDTSFGGNLGRAVFQAKKRVLEPLGLVEEGAKTAPGKKRPIESPDSSTGIGRKGQQPAKKKLNFGQTGDSESVPDPQPIGEPPAGPSGLGSGTMAAGGGAPMADNNEGADGVGNASGNWHCDSTWLGDRVITTSTRTWALPTYNNHLYKQISSQSGATNDNHFFGYSTPWGYFDFNRFHCHFSPRDWQRLINNNWGFRPRKLRFKLFNIQVKEVTTNDGVTTIANNLTSTIQVFSDSEYQLPYVLGSAHQGCLPPFPADVFMIPQYGYLTLNNGSQSVGRSSFYCLEYFPSQMLRTGNNFEFSYTFEEVPFHSSYAHSQSLDRLMNPLIDQYLYYLARTQSTTGSTRELQFHQAGPNTMAEQSKNWLPGPCYRQQRLSKNIDSNNNSNFAWTGATKYHLNGRNSLTNPGVAMATNKDDEDQFFPINGVLVFGKTGAANKTTLENVLMTSEEEIKTTNPVATEEYGVVSSNLQSSTAGPQTQTVNSQGALPGMVWQNRDVYLQGPIWAKIPHTDGNFHPSPLMGGFGLKHPPPQILIKNTPVPANPPEVFTPAKFASFITQYSTGQVSVEIEWELQKENSKRWNPEIQYTSNYAKSNNVEFAVNNEGVYTEPRPIGTRYLTRNL

SEQ ID NO: 4722 - protein, 728 aa, Adeno-associated virus
MAADGYLPDWLEDNLSEGIREWWDLKPGAPKPKANQQKQDDGRGLVLPGYKYLGPFNGLDKGEPVNAADAAALEHDKAYDQQLKAGDNPYLRYNHADAEFQERLQEDTSFGGNLGRAVFQAKKRVLEPLGLVEEGAKTAPGKKRPIESPDSSTGIGKKGQQPAKKKLNFGQTGDSESVPDPQPIGEPPAGPSGLGSGTMAAGGGAPMADNNEGADGVGNASGNWHCDSTWLGDRVITTSTRTWALPTYNNHLYKQISSQSGATNDNHFFGYSTPWGYFDFNRFHCHFSPRDWQRLINNNWGFRPRKLRFKLFNIQVKEVTTNDGVTTIANNLTSTIQVFSDSEYQLPYVLGSAHQGCLPPFPADVFMIPQYGYLTLNNGSQSVGRSSFYCLEYFPSQMLRTGNNFEFSYTFEEVPFHSSYAHSQSLDRLMNPLIDQYLYYLARTQSTTGSTRELQFHQAGPNTMAEQSKNWLPGPCYRRQRLSKDIDSNNNSNFAWTGATKYHLNGRNSLTNPGVAMATNKDDEDQFFPINGVLVFGKTGAANKTTLENVLMTSEEEIKTTNPVATEEYGVVSSNLQSSTAGPQTQTVNSQGALPGMVWQNRDVYLQGPIWAKIPHTDGNFHPSPLMGGFGLKHPPPQILIKNTPVPANPPEVFTPAKFASFITQYSTGQVSVEIEWELQKENSKRWNPEIQYTSNYAKSNNVEFAVNNEGVYTEPRPIGTRYLTRNL

SEQ ID NO: 4723 - protein, 685 aa, Adeno-associated virus
MAADGYLPDWLEDNLSEGIREWWDLKPGAPKPKANQQKQDDGRGLVLPGYKYLGPFNGLDKGEPVNEADAAALEHDKAYDKQLEQGDNPYLKYNHADAEFQERLQEDTSFGGNLGRAVFQAKKRVLEPLGLVEEGAKTAPGKKRPVEPSPQRSPDSSTGIGKTGQQPAKKRLNFGQTGDSESVPDPQPIGEPPAGPSGLGSGTMAAGGGAPMADNNEGADGVGSSSGNWHCDSTWLGDRVITTSTRTWALPTYNNHLYKQISNGTSGGSTNDNTYFGYSTPWGYFDFNRFHCHFSPRDWQRLINNNWGFRPKRLNFKLFNIQVKEVTQNEGTKTIANNLTSTIQVFTDSEYQLPYVLGSAHQGCLPPFPADVFMIPQYGYLTLNNGSQAVGRSSFYCLEYFPSQMLRTGNNFEFSYQFEDVPFHSSYAHSQSLDRLTNPLIDQYLYYLARTQSTTGSTRGLQFHQAGPNTMAEQSKNWLPGPCYRQQRLSKNIDSNNNSNFAWTGATKYHLNGRNSLTNPGVAMATNKDDEDQFFPINGVLVFGKTGAANKTTLENVLMTSEEEIKTTNPVATEEYGVVSSNLQSSTAGPQTQTVNSQGALPGMVWQNRDVYLQGPIWAKIPHTDGNFHPSPLMGGFGLKHPPPQILIKYTSNYYKSTNVDFAVNTEGTYSEPRPIGTRYLTRNL

SEQ ID NO: 4724 - protein, 733 aa, Adeno-associated virus
MAADGYLPDWLEDNLSEGIREWWDLKPGAPKPKANQQKQDDGRGLVLPGYKYLGPFNGLDKGEPVNAADAAALEHDKAYDQQLKAGDNPYLRYNHADAEFQERLQEDTSFGGNLGRAVFQAKKRVLEPLGLVEEGAKTAPGKKRPIESPDSSTGIGKKGQQPAKKKLNFGQTGDSESVPDPQPIGEPPAGPSGLGSGTMAAGGGAPMADNNEGADGVGSSSGNWHCDSTWLGDRVITTSTRTWALPTYNNHLYKQISNGTSGGSTNDNTYFGYSTPWGYFDFNRFHCHFSPRDWQRLINNNWGFRPKRLNFKLFNIQVKEVTQNEGTKTIANNLTSTIQVFTDSEYQLPYVLGSAHQGCLPPFPADVFMIPQYGYLTLNNGSQAVGRSSFYCLEYFPSQMLRTGNNFEFSYQFEDVPFHSSYAHSQSLDRLMNPLIDQYLYYLSRTQSTGGTAGTQQLLFSQAGPNNMSAQAKNWLPGPCYRQQRVSTTVSQNNNSNFAWTGATKYHLNGRDSLVNPGVAMATHKGDEERFFPSSGVLMFGKQGAGKDNVDYSSVMLTSEEEIKTTNPVATEQYGVVADNLQQQNAAPIVGAVNSQGALPGMVWQNRDVYLQGPIWAKIPHTDGNFHPSPLMGGFGLKHPPPQILIKNTPVPADPPTTFSQAKLASFITQYSTGQVSVEIEWELQKENSKRWNPEIQYTSNYYKSTNVDFAVNTEGTYSEPRPIGTRYLTRSL

SEQ ID NO: 4725 - protein, 738 aa, Adeno-associated virus
MAADGYLPDWLEDNLSEGIREWWDLKPGAPKPKANQQKQDDGRGLVLPGYKYLGPFNGLDKGEPVNAADAAALEHDKAYDQQLKAGDNPYLRYNHADAEFQERLQEDTSFGGNLGRAVFQAKKRVLEPLGLVEEGAKTAPGKKRPVEPSPQRSPDSSTGIGKTGQQPAKKRLNFGQTGDSESVPDPQPIGEPPAGPSGLGSGTMAAGGGAPMADNNEGADGVGSSSGNWHCDSTWLGDRVITTSTRTWALPTYNNHLYKQISNGTSGGSTNDNTYFGYSTPWGYFDFNRFHCHFSPRDWQRLINNNWGFRPKRLNFKLFNIQVKEVTQNEGTKTIANNLTSTIQVFTDSEYQLPYVLGSAHQGCPPPFPADVFMIPQYGYLTLNNGSQAVGRSSFYCLEYFPSQMRRTGNNFEFSYQFEDVPFHSSYAHSQSLDRLMNPLIDQYLYYLSRTQSTGGTAGTQQLLFSQAGPNNMSAQAKNWLPGPCYRQQRVSTTLSQNNNSNFAWTGATKYHLNGRDSLVNPGVAMATHKDDEERFFPSSGVLMFGKQGAGKDNVDYSSVMLTSEEEIKTTNPVATEQYGVVADNLQQQNAAPIVGAVNSQGALPGMVWQNRDVYLQGPIWAKIPHTDGNFHPSPLMGGFGLKHPPPQILIKNTPVPADPPTTFSQAKLASFITQYSTGQVSVEIEWELQKENSKRWNPEIQYTSNYYKSTNVDFAVNTEGTYSEPRPIGTRYLTRNL

SEQ ID NO: 4726 - protein, 733 aa, Adeno-associated virus
MAADGYLPDWLEDNLSEGIREWWDLRPGAPKPKANQQKQDDGRGLVLPGYKYLGPFNGLDKGEPVNEADAAALEHDKAYDKQLEQGDNPYLKYNHADAEFQERLQEDTSFGGNLGRAVFQAKKRVLEPLGLVEEGAKTAPGKKRPIESPDSSTGIGKKGQQPAKKRLNFGQTGDSESVPDPQPIGEPPAGPSGLGSGTMAAGGGAPMADNNEGADGVGSSSGNWHCDSTWLGDRVITTSTRTWALPTYNNHLYKQISNGTSGGSTNDNTYFGYSTPWGYFDFNRFHCHFSPRDWQRLINNNWGFRPKRLNFKLFNIQVKEVTQNEGTKTIANNLTSTIQVFTDSEYQLPYVLGSAHQGCLPPFPADVFMIPQYGYLTLNNGSQAVGRSSFYCLEYFPSQMLRTGNNFEFSYQFEDVPFHSSYAHSQSLDRLMNPLIDQYLYYLSRTQSTGGTAGTQQLLFSQAGPNNMSAQAKNWLPGPCYRQQRVSTTVSQNNNSNFAWTGATKYHLNGRDSLVNPGVAMATHKGDEERFFPSSGVLMFGKQGAGKDNVDYSSVMLTSEEEIKTTNPVATEQYGVVADNLQQQNAAPIVGAVNSQGALPGMVWQNRDVYLQGPIWAKIPHTDGNFHPSPLMGGFGLKHPPPQILIKNTPVPADPPTTFSQAKLASFITQYSTGQVSVEIEWELQKENSKRWNPEIQYTSNYYKSTNVDFAVNTEGTYSEPRPIGTRYLTRNL

SEQ ID NO: 4727 - protein, 3098 aa, Adeno-associated virus
GAATTCGCCCTTTCTACGGCTGCGTCAACTGGACCAATGAGAACTTTCCCTTCAACGATTGCGTCGACAAGATGGTGATCTGGTGGGAGGAGGGCAAGATGACGGCCAAGGTCGTGGAGTCCGCCAAGGCCATTCTCGGCGGCAGCAAGGTGCGCGTGGACCAAAAGTGCAAGTCTTCCGCCCAGATCGATCCCACCCCCGTGATCGTCACTTCCAACACCAACATGTGCGCTGTGATTGACGGGAACAGCACCACCTTCGAGCACCAGCAGCCGTTACAAGACCGGATGTTCAAATTTGAACTCACCCGCCGTCTGGAGCACGACTTTGGCAAGGTGACAAAGCAGGAAGTCAAAGAGTTCTTCCGCTGGGCGCAGGATCACGTGACCGAGGTGGCGCATGAGTTCTACGTCAGAAAGGGTGGAGCCAACAAGAGACCCGCCCCCGATGACGCGGATAAAAGCGAGCCCAAGCGGGCCTGCCCCTCAGTCGCGGATCCATCGACGTCAGACGCGGAAGGAGCTCCGGTGGACTTTGCCGACAGGTACCAAAACAAATGTTCTCGTCACGCGGGCATGCTTCAGATGCTGTTTCCCTGCAAGACATGCGAGAGAATGAATCAGAATTTCAACATTTGCTTCACGCACGGGACCAGAGACTGTTCAGAATGTTTCCCCGGCGTGTCAGAATCTCAACCGGTCGTCAGAAAGAGGACGTATCGGAAACTCTGTGCCATTCATCATCTGCTGGGGCGGGCTCCCGAGATTGCTTGCTCGGCCTGCGATCTGGTCAACGTGGACCTGGATGACCGTGTTTCTGAGCAATAAATGACTTAAACCAGGTATGGCTGCCGATGGTTATCTTCCAGATTGGCTCGAGGACAACCTCTCTGAGGGCATTCGCGAGTGGTGGGACTTGAAACCTGGAGCCCCGAAACCCAAAGCCAACCAGCAAAAGCAGGACGACGGCCGGGGTCTGGTGCTTCCTGGCTACAAGTACCTCGGACCCTTCAACGGACTCGACAAGGGAGAGCCGGTCAACGAGGCAGACGCCGCGGCCCTCGAGCACGACAAGGCCTACGACAAGCAGCTCGAGCAGGGGGACAACCCGTACCTCAAGTACAACCACGCCGACGCCGAGTTTCAGGAGCGTCTTCAAGAAGATACGTCTTTTGGGGGCAACCTCGGGCGAGCAGTCTTCCAGGCCAAGAAGCGGGTTCTCGAACCTCTCGGTCTGGTTGAGGAAGGCGCTAAGACGGCTCCTGGAAAGAAGAGACCCATAGAATCCCCCGACTCCTCCACGGGCATCGGCAAGAAAGGCCAGCAGCCCGCTAAAAAGAAGCTCAACTTTGGGCAGACTGGCGACTCAGAGTCAGTGCCCGACCCCCAACCTCTCGGAGAACCTCCCGCCGCGCCCTCAGGTCTGGGATCTGGTACAATGGCTGCAGGCGGTGGCGCACCAATGGCAGACAATAACGAAGGCGCCGACGGAGTGGGTAATGCCTCCGGAAATTGGCATTGCGATTCCACATGGCTGGGCGACAGAGTCATCACCACCAGCACCCGCACCTGGGCCCTGCCCACCTACAACAACCACCTCTACAAGCAGATATCAAGTCAGAGCGGGGCTACCAACGACAACCACTTCTTCGGCTACAGCACCCCCTGGGGCTATTTTGACTTCAACAGATTCCACTGCCACTTCTCACCACGTGACTGGCAGCGACTCATCAACAACAACTGGGGATTCCGGCCCAGAAAGCTGCGGTTCAAGTTGTTCAACATCCAGGTCAAGGAGGTCACGACGAACGACGGCGTTACGACCATCGCTAATAACCTTACCAGCACGATTCAGGTCTTCTCGGACTCGGAGTACCAACTGCCGTACGTCCTCGGCTCTGCGCACCAGGGCTGCCTCCCTCCGTTCCCTGCGGACGTGTTCATGATTCCTCAGTACGGATATCTGACTCTAAACAACGGCAGTCAGTCTGTGGGACGTTCCTCCTTCTACTGCCTGGAGTACTTTCCTTCTCAGATGCTGAGAACGGGCAATAACTTTGAATTCAGCTACACCTTTGAGGAAGTGCCTTTCCACAGCAGCTATGCGCACAGCCAGAGCCTGGACCGGCTGATGAATCCCCTCATCGACCAGTACCTGTACTACCTGGCCCGGACCCAGAGCACTACGGGGTCCACAAGGGAGCTGCAGTTCCATCAGGCTGGGCCCAACACCATGGCCGAGCAATCAAAGAACTGGCTGCCCGGACCCTGTTATCGGCAGCAGAGACTGTCAAAAAACATAGACAGCAACAACAACAGTAACTTTGCCTGGACCGGGGCCACTAAATACCATCTGAATGGTAGAAATTCATTAACCAACCCGGGCGTAGCCATGGCCACCAACAAGGACGACGAGGACCAGTTCTTTCCCATCAACGGAGTGCTGGTTTTTGGCGAAACGGGGGCTGCCAACAAGACAACGCTGGAAAACGTGCTAATGACCAGCGAGGAGGAGATCAAAACCACCAATCCCGTGGCTACAGAAGAATACGGTGTGGTCTCCAGCAACCTGCAATCGTCTACGGCCGGACCCCAGACACAGACTGTCAACAGCCAGGGGGCTCTGCCCGGCATGGTCTGGCAGAACCGGGACGTGTACCTGCAGGGTCCCATCTGGGCCAAAATTCCTCACACGGACGGCAACTTTCACCCGTCTCCCCTGATGGGCGGATTTGGACTCAAACACCCGCCTCCTCAAATTCTCATCAAAAACACCCCGGTACCTGCTAATCCTCCAGAGGTGTTTACTCCTGCCAAGTTTGCCTCATTTATCACGCAGTACAGCACCGGCCAGGTCAGCGTGGAGATCGAGTGGGAACTGCAGAAAGAAAACAGCAAACGCTGGAATCCAGAGATTCAGTACACCTCAAATTATGCCAAGTCTAATAATGTGGAATTTGCTGTCAACAACGAAGGGGTTTATACTGAGCCTCGCCCCATTGGCACCCGTTACCTCACCCGTAACCTGTAATTGCCTGTTAATCAATAAACCGGTTAATTCGTTTCAGTTGAACTTTGGTCTCTGCGAAGGGCGAATTC

SEQ ID NO: 4728 - protein, 728 aa, Adeno-associated virus
MAADGYLPDWLEDNLSEGIREWWDLKPGAPKPKANQQKQDDGRGLVLPGYKYLGPFNGLDKGEPVNEADAAALEHDKAYDKQLEQGDNPYLKYNHADAEFQERLQEDTSFGGNLGRAVFQAKKRVLEPLGLVEEGAKTAPGKKRPIESPDSSTGIGKKGQQPAKKKLNFGQTGDSESVPDPQPLGEPPAAPSGLGSGTMAAGGGAPMADNNEGADGVGNASGNWHCDSTWLGDRVITTSTRTWALPTYNNHLYKQISSQSGATNDNHFFGYSTPWGYFDFNRFHCHFSPRDWQRLINNNWGFRPRKLRFKLFNIQVKEVTTNDGVTTIANNLTSTIQVFSDSEYQLPYVLGSAHQGCLPPFPADVFMIPQYGYLTLNNGSQSVGRSSFYCLEYFPSQMLRTGNNFEFSYTFEEVPFHSSYAHSQSLDRLMNPLIDQYLYYLARTQSTTGSTRELQFHQAGPNTMAEQSKNWLPGPCYRQQRLSKNIDSNNNSNFAWTGATKYHLNGRNSLTNPGVAMATNKDDEDQFFPINGVLVFGETGAANKTTLENVLMTSEEEIKTTNPVATEEYGVVSSNLQSSTAGPQTQTVNSQGALPGMVWQNRDVYLQGPIWAKIPHTDGNFHPSPLMGGFGLKHPPPQILIKNTPVPANPPEVFTPAKFASFITQYSTGQVSVEIEWELQKENSKRWNPEIQYTSNYAKSNNVEFAVNNEGVYTEPRPIGTRYLTRNL

SEQ ID NO: 4729 - protein, 733 aa, Adeno-associated virus
MAADGHLPDWLEDNLSEGIREWWDLKPGAPKPKANQQKQDDGRGLVLPGYKYLGPFNGLDKGEPVNAADAAALEHDKAYDQQLKAGDNPYLRYNHADAEFQERLQEDTSFGGNLGRAVFQAKKRVLEPLGLVEEGAKTAPGKKRPIESPDSSTGIGKKGQQPAKKKLNFGQTGDSESVPDPQPIGEPPAGPSGLGSGTMAAGGGAPMADNNEGADGVGSSSGNWHCDSTWLGDRVITTSTRTWALPTYNNHLYKQISNGTSGGSTNDNTYFGYSTPWGYFDFNRFHCHFSPRDWQRLINNSWGFRPKRLNFKLFNIQVKEVTQNEGTKTIANNLTSTIQVFTDSEYQLPYVLGSAHQGCLPPFPADVFMIPQYGYLTLNNGSQAVGRSSFYCLEYFPSQMLRTGNNFEFSYQFEDVPFHSSYAHSQSLDRLMNPLIDQYLYYLSRTQSTGGTAGTQQLLFSQAGPNNMSAQAKNWLPGPCYRQQRVSTTLSQNNNSNFAWTGATKYHLNGRDSLVNPGVAMATHKDDEERFFPSSGVLMFGKQGAGKDNVDYSSVMLTSEEEIKTTNPVATEQYGVVADNLQQQNAAPIVGAVNSQGALPGMVWQNRDVYLQGPIWAKIPHTDGNFHPSPLMGGFGLKHPPPQILIKNTPVPADPPTTFSQAKLASFITQYSTGQVSVEIEWELQKENSKRWNPEIQYTSNYYKSTNVDFAVNTEGTYSEPRPIGTRYLTRNL

SEQ ID NO: 4730 - DNA, 2495 bp, Adeno-associated virus
gaattcgccctttctacggctgcgtcaactagaccaatgagaactttcccttcaacgattgcgtcgacaagatggtgatctggtgggaggagggcaagatgacggccaaggtcgtggagtccgccaaggccattcatcatctgctggggcgggctcccgagattgcttgctcggcctgcgatctggtcaacgtggacctggatgactgtgtttctgagcaataaatgacttaaaccaggtatggctgccgatggttatcttccagattggctcgaggacaacctctctgagggcattcgcgagtggtgggacttgaaacctggagccccgaaacccaaagccaaccagcaaaagcaggacgacggccggggtctggtgcttcctggctacaagtacctcggacccttcaacggactcgacaagggagagccggtcaacgaggcagacgccgcggccctcgagcacgacaaggcctacgacaagcagctcgagcagggggacaacccgtacctcaagtacaaccacgccgacgccgagtttcaggagcgtcttcaagaagatacgtcttttgggggcaacctcgggcgagcagtcttccaggccaagaagcgggttctcgaacctctcggtctggttgaggaaggcgctaagacggctcctggaaagaagagacccatagaatcccccgactcctccacgggcatcggcaagaaaggccagcagcccgctaaaaagaagctcaactttgggcagactggcgactcagagtcagtgcccgaccctcaaccaatcggagaaccccccgcaggcccctctggtctgggatctggtacaatggctgcaggcggtggcgctccaatggcagacaataacgaaggcgccgacggagtgggtaatgcctccggaaattggcattgcgattccacatggctgggcgacagagtcatcaccaccagcacccgcacctgggccctgcccacctacaacaaccacctctacaagcagatatcaagtcagagcggggctaccaacgacaaccacttcttcggctacagcaccccctggggctattttgacttcaacagattccactgccacttctcaccacgtgactggcagcgactcatcaacaacaactggggattccggcccagaaagctgcggttcaagttgttcaacatccaggtcaaggaggtcacgacgaacgacggcgttacgaccatcgctaataaccttaccagcacgattcaggtcttctcggactcggagtaccaactgccgtacgtcctcggctctgcgcaccagggctgcctccctccgttccctgcggacgtgttcatgattcctcagtacggatatctgactctaaacaacggcagtcagtctgtgggacgttcctccttctactgcctggagtactttccttctcagatgctgagaacgggcaataactttgaattcagctacacctttgaggaagtgcctttccacagcagctatgcgcacagccagagcctggaccggctgatgaatcccctcatcgaccagtacctgtactacctggcccggacccagagcactacggggtccacaagggagctgcagttccatcaggctgggcccaacaccatggccgagcaatcaaagaactggctgcccggaccctgttatcggcagcagagactgtcaaaaaacatagacagcaacaacaccagtaactttgcctggaccggggccactaaataccatctgaatggtagaaattcattaaccaacccgggcgtagccatggccaccaacaaggacgacgaggaccagttctttcccatcaacggagtgctggtttttggcaaaacgggggctgccaacaagacaacgctggaaaacgtgctaatgaccagcgaggaggagatcaaaaccaccaatcccgtggctacagaacagtacggtgtggtctccagcaacctgcaatcgtctacggccggaccccagacacagactgtcaacagccagggggctctgcccggcatggtctggcagaaccgggacgtgtacctgcagggtcccatctgggccaaaattcctcacacggacggcaactttcacccgtctcccctgatgggcggatttggactcaaacacccgcctcctcaaattctcatcaaaaacaccccggtacctgctaatcctccagaggtgtttactcctgccaagtttgcctcatttatcacgcagtacagcaccggccaggtcagcgtggagatcgagtgggaactgcagaaagaaaacagcaaacgctggaatccagagattcagtacacctcaaattatgccaagtctaataatgtggaatttgctgtcaacaacgaaggggtttatactgagcctcgccccattggcacccgttacctcacccgtaacctgtaattgcctgttaatcaataaaccggttaattcgtttcagttgaactttggtctctgcgaagggcgaattc

SEQ ID NO: 4731 - protein, 728 aa, Adeno-associated virus
MAADGYLPDWLEDNLSEGIREWWDLKPGAPKPKANQQKQDDGRGLVLPGYKYLGPFNGLDKGEPVNEADAAALEHDKAYDKQLEQGDNPYLKYNHADAEFQERLQEDTSFGGNLGRAVFQAKKRVLEPLGLVEEGAKTAPGKKRPIESPDSSTGIGKKGQQPAKKKLNFGQTGDSESVPDPQPIGEPPAGPSGLGSGTMAAGGGAPMADNNEGADGVGNASGNWHCDSTWLGDRVITTSTRTWALPTYNNHLYKQISSQSGATNDNHFFGYSTPWGYFDFNRFHCHFSPRDWQRLINNNWGFRPRKLRFKLFNIQVKEVTTNDGVTTIANNLTSTIQVFSDSEYQLPYVLGSAHQGCLPPFPADVFMIPQYGYLTLNNGSQSVGRSSFYCLEYFPSQMLRTGNNFEFSYTFEEVPFHSSYAHSQSLDRLMNPLIDQYLYYLARTQSTTGSTRELQFHQAGPNTMAEQSKNWLPGPCYRQQRLSKNIDSNNTSNFAWTGATKYHLNGRNSLTNPGVAMATNKDDEDQFFPINGVLVFGKTGAANKTTLENVLMTSEEEIKTTNPVATEQYGVVSSNLQSSTAGPQTQTVNSQGALPGMVWQNRDVYLQGPIWAKIPHTDGNFHPSPLMGGFGLKHPPPQILIKNTPVPANPPEVFTPAKFASFITQYSTGQVSVEIEWELQKENSKRWNPEIQYTSNYAKSNNVEFAVNNEGVYTEPRPIGTRYLTRNL

SEQ ID NO: 4732 - DNA, 2504 bp, Adeno-associated virus
gaattcgccctttctacggctgcgtcaactggaccaatgagaactttcccttcaacgattgcgtcgacaagatggtgatctggtgggaggagggcaagatgacggccaaggtcgtggagtccgccaaggccattcatcatctgctggggcgggctcccgagattgcttgctcggcctgcgatctggtcaacgtggacctggatgactgtgtttctgagcaataaatgacttaaaccaggtatggctgccgatggttatcttccagattggctcgaggacaacctctctgagggcattcgcgagtggtgggacttgaaacctggagccccgaaacccaaagccaaccagcaaaagcaggacgacggccggggtctggtgcttcctggctacaagtacctcggacccttcaacggactcgacaagggagagccggtcaacgaggcagacgccgcggccctcgagcacgacaaggcctacgacaagcagctcgagcagggggacaacccgtacctcaagtacaaccacgccgacgccgagtttcaggagcgtcttcaagaagatacgtcttttgggggcaacctcgggcgagcagtcttccaggccaagaagcgggttctcgaacctctcggtctggttgaggaaggcgctaagacggctcctggaaagaagagacccatagaatcccccgactcctccacgggcatcggcaagaaaggccagcagcccgctaaaaagaagctcaactttgggcagactggcgactcagagtcagtgcccgaccctcaaccaatcggagaaccccccgcaggcccctctggtctgggatctggtacaatggctgcaggcggtggcgctccaatggcagacaataacgaaggcgccgacggagtgggtaatgcctccggaaattggcattgcgattccacatggctgggcgacagagtcatcaccaccagcacccgcacctgggccctgcccacctacaacaaccacctctacaagcagatatcaagtcagagcggggctaccaacgacaaccacttcttcggctacagcaccccctggggctattttgacttcaacagattccactgccacttctcatcacgtgactggcagcgactcatcaacaacaactggggattccggcccaagagactcaacttcaagctcttcaacatccaggtcaaggaggtcacgcagaatgaaggcaccaagaccatcgccaataaccttaccagcacgattcaggtctttacggactcggaataccggctcccgtacgtcctcggctctgcgcaccagggctgcctgcctccgttcccggcggacgtcttcatgattcctcagtacgggtacctgactctgaacaacggcagtcaggccgtgggccgttcctccttctactgcctggagtactttccttctcaaatgctgagaacgggcaacaactttgagttcagctaccagtttgaggacgtgccttttcacagcagctacgcgcacagccaaagcctggaccggctgatgaaccccctcatcgaccagtacctgtactacctgtctcggactcagtccacgggaggtaccgcaggaactcagcagttgctattttctcaggccgggcctaataacatgtcggctcaggccaaaaactggctacccgggccctgctaccggcagcaacgcgtctccacgacactgtcgcaaaataacaacagcaactttgcttggaccggtgccaccaagtatcatctgaatggcagagactctctggtaaatcccggtgtcgctatggcaacgcacaaggacgacgaagagcgattttttccatccagcggagtcttgatgtttgggaaacagggagctggaaaagacaacgtggactatagcagcgttatgctaaccagtgaggaagaaatcaaaaccaccaacccagtggccacagaacagtacggcgtggtggccgataacctgcaacagcaaaacgccgctcctattgtaggggccgtcaacagtcaaggagccttacctggcatggtctggcagaaccgggacgtgtacctgcagggtcctatctgggccaagattcctcacacggacggcaactttcatccttcgccgctgatgggaggctttggactgaaacacccgcctcctcagatcctgattaagaatacacctgttcccgcggatcctccaactaccttcagtcaagccaagccggcgtcgttcatcacgcagtacagcaccggacaggtcagcgtggaaattgaatgggagctgcagaaagagaacagcaagcgctggaacccagagattcagtatacttccaactactacaaatctacaaatgtggactttgctgtcaatactgagggtacttattcagagcctcgccccattggcacccgttacctcacccgtaacctgtaattgcctgttaatcaataaaccggttaattcgtttcagttgaactttggtctctgcgaagggcgaattc

SEQ ID NO: 4733 - protein, 731 aa, Adeno-associated virus
MAADGYLPDWLEDNLSEGIREWWDLKPGAPKPKANQQKQDDGRGLVLPGYKYLGPFNGLDKGEPVNEADAAALEHDKAYDKQLEQGDNPYLKYNHADAEFQERLQEDTSFGGNLGRAVFQAKKRVLEPLGLVEEGAKTAPGKKRPIESPDSSTGIGKKGQQPAKKKLNFGQTGDSESVPDPQPIGEPPAGPSGLGSGTMAAGGGAPMADNNEGADGVGNASGNWHCDSTWLGDRVITTSTRTWALPTYNNHLYKQISSQSGATNDNHFFGYSTPWGYFDFNRFHCHFSSRDWQRLINNNWGFRPKRLNFKLFNIQVKEVTQNEGTKTIANNLTSTIQVFTDSEYRLPYVLGSAHQGCLPPFPADVFMIPQYGYLTLNNGSQAVGRSSFYCLEYFPSQMLRTGNNFEFSYQFEDVPFHSSYAHSQSLDRLMNPLIDQYLYYLSRTQSTGGTAGTQQLLFSQAGPNNMSAQAKNWLPGPCYRQQRVSTTLSQNNNSNFAWTGATKYHLNGRDSLVNPGVAMATHKDDEERFFPSSGVLMFGKQGAGKDNVDYSSVMLTSEEEIKTTNPVATEQYGVVADNLQQQNAAPIVGAVNSQGALPGMVWQNRDVYLQGPIWAKIPHTDGNFHPSPLMGGFGLKHPPPQILIKNTPVPADPPTTFSQAKPASFITQYSTGQVSVEIEWELQKENSKRWNPEIQYTSNYYKSTNVDFAVNTEGTYSEPRPIGTRYLTRNL

SEQ ID NO: 4734 - protein, 731 aa, Adeno-associated virus
MAADGYLPDWLEDNLSEGIREWWDLKPGAPKPKANQQKQDDGRGLVLPGYKYLGPFNGLDKGEPVNEADAAALEHDKAYDKQLEQGDNPYLKYNHADAEFQERLQEDTSFGGNLGRAVFRAKKRVLEPLGLVEEGAKTAPGKKRPIESPDSSTGIGKKGQQPAKKKLNFGQTGDSESVPDPQPLGEPPAAPSGLGSGTMAAGGGAPMADNNEGADGVGNASGNWHCDSTWLGDRVITTSTRTWALPTYNNHLYKQISSQSGATNDNHFFGYSTPWGYFDFNRFHCHFSPRDWQRLINNNRGFRPRKLRFKLFNIQVKEVTTNDGVTTIANNLTSTIQVFSDSEYQLPYVLGSAHQGCLPPFPADVFMIPQYGYLTLNNGSQSVGRSSFYCLEYFPSQMLRTGNNFEFSYQFEDVPFHSSYAHSQSLDRLMNPLIDQYLYYLSRTQSTGGTAGTQQLLFSQAGPNNMSAQAKNWLPGPCYRQQRVSTTLSQNNNSNFAWTGATKYHLNGRDSLVNPGVAMATHKDDEERFFPSSGVLMFGKQGAGKDNVDYSSVMLTSEEEIKTTNPVATEQYGVVADNLQQQNAAPIVGAVNSQGALPGMAWQNRDVYLQGPIWAKIPHTDGNFHPSPLMGGFGLKHPPPQILIKNTPVPADPPTTFSQAKLASFITQYSTGQVSVEIEWELQKENSKRWNPEIQYTSNYYKSTNVDFAVNTEGTYSEPRPIGTRYLTRNL

SEQ ID NO: 4735 - protein, 738 aa, Adeno-associated virus
MAADGYLPDWLEDNLSEGIREWWDLKPGAPKPKANQQKQDDGRGLVLPGYKYLGPFNGLDKGEPVNEADAAALEHDKAYDKQLEQGDNPYLKYNHADAEFQERLQEDTSFGGNLGRAVFQAKKRVLEPLGLVEEGAKTAPGKKRPVEPSPQRSPDSSTGIGKTGQQPAKKRLNFGQTGDSESVPDPQPIGEPPAGPSGLGSGTMAAGGGAPMADNNEGADGVGSSSGNWHCDSTWLGDRVITTSTRTWALPTYNNHLYKQISNGTSGGSTNDNTYFGYSTPWGYFDFNRFHCHFSPRDWQRLINNNWGFRPKRLNFKLFNIQVKEVTQNEGTKTIANNLTSTIQVFTDSEYQLPYVLGSAHQGCLPPFPADVFMIPQYGYLTLNNGSQAVGRSSFYCLEYFPSQMLRTGNNFEFSYQFEDVPFHSSYAHSQSLDRLMNPLIDQYLYYLSRTQSTGGTAGTQQLLFSQAGPNNMSAQAKNWLPGPCYRQQRVSTTLSQNNNSNFAWTGATKYHLNGRDSLVNPGVAMATHKDDEERFFPSSGVLMFGKQGAGKDNVDYSSVMLTSEEEIKTTNPVATEQYGVVADNLQQQNAAPIVGAVNSQGALPGMVWQNRDVYLQGPIWAKIPHTDGNFHPSPLMGGFGLKHPPPQILIKNTPVPADPPTTFSQAKLASFITQYSTGQVSVEIEWELQKENSKRWNPEIQYTSNYYKSTNVDFAVNTEGTYSEPRPIGTRYLTRNL

SEQ ID NO: 4736 - protein, 735 aa, Adeno-associated virus
MAADGYLPDWLEDNLSEGIREWWDLKPGAPKPKANQQKQDDGRGLVLPGYKYLGPFNGLDKGEPVNEADAAALEHDKAYDKQLEQGDNPYLKYNHADAEFQERLQEDTSFGGNLGRAVFQAKKRVLEPLGLVEEGAKTAPGKKRPVEPSPQRSPDSSTGIGKTGQQPAKKRLNFGQTGDSESVPDPQPIGEPPAGPSGLGSGTMAAGGGAPMADNNEGADGVGSSSGNWHCDSTWLGDRVITTSTRTWALPTYNNHLYKQISNGTSGGSTNDNTYFGYSTPWGYFDFNRFHCHFSPRDWQRLINNNWGFRPRKLRFKLFNIQVKEVTTDDGVTTIANNLTSTIQVFSDSEYQLPYVLGSAHQGCLPPFPADVFMIPQYGYLTLNNGSQSVGRSSFYCLEYFPSQMLRTGNNFEFSYTFEEVPFHSSYAHSQSLDRLMNPLIDQYLYYLARTQSTTGSTRELQFHQAGPNTMAEQSKNWLPGPCYRQQRLSKNIDSNNNSNFAWTGATKYHLNGRNSLTNPGVAMATNKDDEDQFFPINGVLVFGKTGAANKTTLENVLMTSEEEIKTTNPVATEEYGVVSSNLQSSTAGPQTQTVNSQGALPGMVWQNRDVYLQGPIWAKIPHTDGNFHPSPLMDGFGLKHPPPQILIKNTPVPANPPEVFTPAKFASFITQYSTGQVSVEIEWELQKENSKRWNPEIQYTSNYAKSNNVEFAVNNEGVYTEPRPIGTRYLTRNL

SEQ ID NO: 4737 - DNA, 3128 bp, Adeno-associated virus
gaattcgccctttctacggctgcgtcaactggaccaatgagaactttcccttcaacgattgcgtcgacaagatggtgatctggtgggaggagggcaagatgacggccaaggtcgtggagtccgccaaggccattctcggcggcagcaaggtgcgcgtggaccaaaagtgcaagtcttccgcccagatcgatcccacccccgtgatcgtcacttccaacaccaacatgtgcgccgtgattgacgggaacagcaccaccttcgagcaccagcagccgttacaagaccggatgttcaaatttgaactcacccgccgtctggagcacgactttggcaaggtgacaaagcaggaagtcaaagagttcttccgctgggcgcaggatcacgtgaccgaggtggcgcatgagttctacgtcagaaagggtggagccaacaagagacccgcccccgatgacgcggataaaagcgagcccaagcgggcctgcccctcagtcgcggatccatcgacgtcagacgcggaaggagctccggtggactttgccgacaggtaccaaaacaaatgttctcgtcacgcgggcatgcttcagatgctgtttccctgcaagacatgcgagagaatgaatcagaatttcaacatttgcttcacgcacgggaccagagactgttcagaatgtttccccggcgtgtcagaatctcaaccggtcgtcagaaagaggacgtatcggaaactctgtgccattcatcatctgctagggcgggctcccgagattgcttgctcggcctgcgatctggtcaacgtggacctggatgactgtgtttctgagcaataaatgacttaaaccaggtatggctgccgatggttatcttccagattggctcgaggacaacctctctgagggcattcgcgagtggtgggacttgaaacctggagccccgaaacccaaagccaaccagcaaaagcaggacgacggccggggtctggtgcttcctggctacaagtacctcggacccttcaacggactcgacaagggggagcccgtcaacgcggcggacgcagcggccctcgagcacgacaaggcctacgaccagcagctcaaagcgggtgacaatccgtacctgcggtataaccacgccgacgccgagtttcaggagcgtctgcaagaagatacgtcttttgggggcaacctcgggcgagcagtcttccaggccaagaagcgggttctcgaacctctcggtctggttgaggaaggcgctaagacggctcctggaaagaagagaccggtagagccatcaccccagcgttctccagactcctctacgggcatcggcaagacaggccagcagcccgcgaaaaagagactcaactttgggcagactggcgactcagagtcagtgcccgaccctcaaccaatcggagaaccccccgcaggcccctctggtctgggatctggtacaatggctgcaggcggtggcgctccaatggcagacaataacgaaggcgccgacggagtgggtagttcctcaggaaattggcattgcgattccacatggctgggcgacagagtcatcaccaccagcacccgaacctgggccctccccacctacaacaaccacctctacaagcaaatctccaacgggacatcgggaggaagcaccaacgacaacacctacttcggctacagcaccccctgggggtattttgactttaacagattccactgccacttctcaccacgtgactggcagcgactcatcaacaacaactggggattccggcccaagagactcaacttcaagctcttcaacatccaggtcaaggaggtcacgcagaatgaaggcaccaagaccatcgccaataaccttaccagcacgattcaggtctttacggactcggaataccagctcccgtacgtcctcggctctgcgcaccagggctgcctgcctccgttcccggcggacgtcttcatgattcctcagtacgggtacctgactctgaacaacggcagtcaggccgtgggccgttcctccttctactgcctggagtactttccttctcaaatgctgagaacgggcaacaactttgagttcagctaccagtttgaggacgtgccttttcacagcagctacgcgcacagccaaagcctggaccggctgatgaaccccctcatcgaccagtacctgtactacctgtctcggactcagtccacgggaggtaccgcaggaactcagcagttgctattttctcaggccgggcctaataacatgtcggctcaggccaaaaactggctacccgggccctgctaccggcagcaacgcgtctccacgacactgtcgcaaaataacaacagcaactttgcttggaccggtgccaccaagtatcatctgaatggcagagactctctggtaaatcccggtgtcgctatggcaacgcacaaggacgacgaagagcgattttttccatccagcggagtcttgatgtttgggaaacagggagctggaaaagacaacgtggactatagcagcgttatgctaaccagtgaggaagaaatcaaaaccaccaacccagtggccacagaacagtacggcgtggtggccgataacctgcaacagcaaaacgccgctcctattgtaggggccgtcaacagtcaaggagccttacctggcatggtctggcagaaccgggacgtgtacctgcagggtcctatctgggccaagattcctcacacggacggcaactttcatccttcgccgctgatgggaggctttggactgaaacacccgcctcctcagatcctgattaagaatacacctgttcccgcggatcctccaactaccttcagtcaagccaagctggcgtcgttcatcacgcagtacagcaccggacaggtcagcgtggaaattgaatgggagctgcagaaagagaacagcaagcgctggaacccagagattcagtatacttccaactactacaaatctacaaatgtggactttgctgtcaatactgagggtacttattcagagcctcgccccattggcacccgttacctcacccgtaacctgtaattgcctgttaatcaataaaccggctaattcgtttcagttgaactttggtctctgcgaagggcgaattc

SEQ ID NO: 4738 - protein, 738 aa, Adeno-associated virus
MAADGYLPDWLEDNLSEGIREWWDLKPGAPKPKANQQKQDDGRGLVLPGYKYLGPFNGLDKGEPVNAADAAALEHDKAYDQQLKAGDNPYLRYNHADAEFQERLQEDTSFGGNLGRAVFQAKKRVLEPLGLVEEGAKTAPGKKRPVEPSPQRSPDSSTGIGKTGQQPAKKRLNFGQTGDSESVPDPQPIGEPPAGPSGLGSGTMAAGGGAPMADNNEGADGVGSSSGNWHCDSTWLGDRVITTSTRTWALPTYNNHLYKQISNGTSGGSTNDNTYFGYSTPWGYFDFNRFHCHFSPRDWQRLINNNWGFRPKRLNFKLFNIQVKEVTQNEGTKTIANNLTSTIQVFTDSEYQLPYVLGSAHQGCLPPFPADVFMIPQYGYLTLNNGSQAVGRSSFYCLEYFPSQMLRTGNNFEFSYQFEDVPFHSSYAHSQSLDRLMNPLIDQYLYYLSRTQSTGGTAGTQQLLFSQAGPNNMSAQAKNWLPGPCYRQQRVSTTLSQNNNSNFAWTGATKYHLNGRDSLVNPGVAMATHKDDEERFFPSSGVLMFGKQGAGKDNVDYSSVMLTSEEEIKTTNPVATEQYGVVADNLQQQNAAPIVGAVNSQGALPGMVWQNRDVYLQGPIWAKIPHTDGNFHPSPLMGGFGLKHPPPQILIKNTPVPADPPTTFSQAKLASFITQYSTGQVSVEIEWELQKENSKRWNPEIQYTSNYYKSTNVDFAVNTEGTYSEPRPIGTRYLTRNL

SEQ ID NO: 4739 - DNA, 3084 bp, Adeno-associated virus
gaattcgccctttctacggctgcatcaactggaccaatgagaactttcccttcaacgattgcgtcgacaagatggtgatctggtgggaggagggcaagatgacggccaaggtcgtggagtccgccaaggccattctcggcggcagcaaggtgcgcgtggaccaaaagtgcaagtcgtccgcccagatcgaccccacccccgtgatcgtcacctccaacaccaacatgtgcgccgtgattgacgggaacagcaccaccttcgagcaccagcagccgttgcaggaccggatgttcaagttcgaactcacccgccgtctggagcacgactttggcaaggtgaccaagcaggaagtcaaagagttcttccgctgggcgcaggatcacgtgaccgaggtggcgcatgagttctacgtcagaaagggcggagccagcaaaagacccgcccccgatgacgcggatataagcgagcccaagcgggcctgcccctcagtcgcggatccatcgacgtcagacgcggaaggagctccggtggactttgccgacaggtaccaaaacaaatgttctcgtcacgcgggcatgcttcagatgctgtttccctgcaaaacgtgcgagaaaatgaatcagaatttcaacatttgcttcacgcacggggtcagagactgctcagaatgtttccccggtgcatcagaatctcaaccggtcgtcagaaaaaaaacgtatcagaaactgtgtgccattcatcatctgctggggcgggcacccgagattgcttgctcggcctgcgatctggtcaacgtggacctggacgactgtgtttctgagcaataaatgacttaaaccaggtatggctgccgatggttatcttccagattggcttgaggacaacctctctgagggcattcgcgagtggtgggacctgaaacctggagccccgaaacccaaagccaaccagcaaaagcaggacgacggccggggtctggtgcttcctggctacaagtacctcggacccttcaacggactcgacaagggggagcccgtcaacgcggcggacgcagcggccctcgagcacgacaaggcctacgaccagcagctcaaagcgggtgacaatccgtacctgcggtataaccacgccgacgccgagtttcaggagcgtctgcaagaagatacgtcttttgggggcaacctcgggcgagcagtcttccaggccaagaagcgggttctcgaacctctcggtctggttgaggaaggcgctaagacggctcctggaaagaagagaccggtagagccatcacctcagcgttcccccgactcctccacgggcatcggcaagaaaggccaccagcccgcgagaaagagactgaactttgggcagactggcgactcggagtcagtccccgaccctcaaccaatcggagaaccaccagcaggcccctctggtctgggatctggtacaatggctgcaggcggtggcgctccaatggcagacaataacgaaggcgccgacggagtgggtagttcctcaggaaattggcattgcgattccacatggctgggcgacagagtcatcaccaccagcacccgaacctgggccctgcccacctacaacaaccatctctacaagcaaatctccaacgggacatcgggaggaagcactaacgacaacacctactttggctacagcaccccctgggggtattttgacttcaacagattccactgccacttctcaccacgtgactggcagcgactcatcaacaataactggggattccggcccaagagactcaacttcaagctcttcaacatccaggtcaaggaggtcacgcagaatgaaggcaccaagaccatcgccaataaccttaccagcacgattcaggtgtttacggactcggaataccagctcccgtacgtccccggctctgcgcaccagggctgcctccctccgttcccggcggacgtcttcatgattcctcagtacgggtatctgaccctaaacaatggcagtcaggctgtgggccgttcctccttctactgcctggaatacttcccttctcaaatgctgaggacgggcaacaactttgaattcagctacaccttcgaggacgtgcctttccacagcagctacgcgcacagccagagcctggaccggctgatgaaccctctcatcgaccagtacctgtattacttatccagaactcagtccacaggaggaactcaaggtactcagcaattgttattttctcaagccgggcccgcaaacatgtcggctcaggccaagaactggctacctggaccgtgttaccgtcagcaacgagtttccacgacactgtcgcaaaacaacaacagcaattttgcttggaccggtgccaccaagtatcacctgaatggcagagactccctggttaatcccggcgttgccatggctacccacaaggacgacgaggagcgcttcttcccgtcaagcggagttctaatgtttggcaagcagggggctggaaaagacaatgtggactacagcagcgtgatgctcaccagcgaagaagaaattaaaactactaacccagtggctacagagcagtatggtgtggtggcagacaacctgcagcagaccaacggagctcccattgtgggaactgtcaacagccagggggccttacctggtatggtctggcaaaaccgggacgtgtacctgcagggccccatctgggccaaaattcctcacacggacggcaactttcatccttcgccgctgatgggaggctttggactgaaacacccgcctcctcagatcctggtgaaaaacactcctgttcctgcggatcctccgaccaccttcagccaggccaagctggcttcttttatcacgcagtacagcaccggacaggtcagcgtggaaatcgaatgggagctgcagaaagaaaacagcaagcgctggaacccagagattcagtatacttccaactactacaaatctacaaatgtggactttgctgtcaatactgagggtacttattcagagcctcgccccattggcactcgttatctcacccgtaatctgtaattgcttgttaatcaataaaccggt

SEQ ID NO: 4740 - protein, 738 aa, Adeno-associated virus
MAADGYLPDWLEDNLSEGIREWWDLKPGAPKPKANQQKQDDGRGLVLPGYKYLGPFNGLDKGEPVNAADAAALEHDKAYDQQLKAGDNPYLRYNHADAEFQERLQEDTSFGGNLGRAVFQAKKRVLEPLGLVEEGAKTAPGKKRPVEPSPQRSPDSSTGIGKKGHQPARKRLNFGQTGDSESVPDPQPIGEPPAGPSGLGSGTMAAGGGAPMADNNEGADGVGSSSGNWHCDSTWLGDRVITTSTRTWALPTYNNHLYKQISNGTSGGSTNDNTYFGYSTPWGYFDFNRFHCHFSPRDWQRLINNNWGFRPKRLNFKLFNIQVKEVTQNEGTKTIANNLTSTIQVFTDSEYQLPYVPGSAHQGCLPPFPADVFMIPQYGYLTLNNGSQAVGRSSFYCLEYFPSQMLRTGNNFEFSYTFEDVPFHSSYAHSQSLDRLMNPLIDQYLYYLSRTQSTGGTQGTQQLLFSQAGPANMSAQAKNWLPGPCYRQQRVSTTLSQNNNSNFAWTGATKYHLNGRDSLVNPGVAMATHKDDEERFFPSSGVLMFGKQGAGKDNVDYSSVMLTSEEEIKTTNPVATEQYGVVADNLQQTNGAPIVGTVNSQGALPGMVWQNRDVYLQGPIWAKIPHTDGNFHPSPLMGGFGLKHPPPQILVKNTPVPADPPTTFSQAKLASFITQYSTGQVSVEIEWELQKENSKRWNPEIQYTSNYYKSTNVDFAVNTEGTYSEPRPIGTRYLTRNL

SEQ ID NO: 4741 - DNA, 3123 bp, Adeno-associated virus
gaattcgcccttggctgcgtcaactggaccaatgagaactttcccttcaacgattgcgtcgacaagatggtgatctggtgggaggagggcaagatgacggccaaggtcgtggagtccgccaaggccattctcggcggcagcaaggtgcgcgtggaccaaaagtgcaagtcgtccgcccagatcgaccccacccccgtgatcgtcacctccaacaccaacatgtgcgccgtgattgacgggaacagcaccaccttcgagcaccagcagccgttgcaggaccggatgttcaagttcgaactcacccgccgtctggagcacgactttggcaaggtgaccaagcaggaagtcaaagagttcttccgctgggcgcaggatcacgtgaccgaggtggcgcatgagttctacgtcagaaagggcggagccagcaaaagacccgcccccgatgacgcggatataagcgagcccaagcgggcctgcccctcagtcgcggatccatcgacgtcagacgcggaaggagctccggtggactttgccgacaggtaccaaaacaaatgttctcgtcacgcgggcatgctccagatgctgtttccctgcaaaacgtgcgagagaatgaatcagaatttcaacatttgcttcacgcacggggtcagagactgctcagaatgtttccccggtgcatcagaatctcaaccggtcgtcagaaaaaaaacgtatcagaaactgtgtgccattcatcatctgctggggcgggcacccgagattgcttgctcggcctgcgatctggtcaacgtggacctggacgactgtgtttctgagcaataaatgacttaaaccaggtatggctgccgatggttatcttccagattggcttgaggacaacctctctgagggcattcgcgagtggtgggacctgaaacctggagccccgaaacccaaagccaaccagcaaaagcaggacgacggccggggtctggtgcttcctggctacaagtacctcggacccttcaacggactcgacaagggggagcccgtcaacgcggcggacgcagcggccctcgagcacgacaaggcctacgaccagcagctcaaagcgggtgacaatccgtacctgcggtataaccacgccgacgccgagtttcaggagcgtctgcaagaagatacgtcttttgggggcaacctcgggcgagcagtcttccaggccaagaagcgggttctcgaacctctcggtctggttgaggaaggcgctaagacggctcctggaaagaagagaccggtagagccatcacctcagcgttcccccgactcctccacgggcatcggcaagaaaggccaccagcccgcgagaaagagactgaactttgggcagactggcgactcggagtcagtccccgaccctcaaccaatcggagaaccaccagcaggcccctctggtctgggatctggtacaatggctgcaggcggtggcgctccaatggcagacaataacgaaggcgccgacggagtgggtagttcctcaggaaattggcattgcgattccacatggctgggcgacagagtcatcaccaccagcacccgaacctgggccctgcccacctacaacaaccatctctacaagcaaatctccaacgggacatcgggaggaagcactaacgacaacacctactttggctacagcaccccctgggggtattttgacttcaacagattccactgccacttctcaccacgtgactggcagcgactcatcaacaataactggggattccggcccaagagactcaacttcaagctcttcaacatccaggtcaaggaggtcacgcagaatgaaggcaccaagaccatcgccaataaccttaccagcacgattcaggtgtttacggactcggaataccagctcccgtacgtcctcggctctgcgcaccagggctgcctccctccgttcccggcggacgtcttcatgattcctcagtacgggtatctgaccctaaacaatggcagtcaggctgtgggccgttcctccttctactgcctggaatacttcccttctcaaatgctgaggacgggcaacaactttgaattcagctacaccttcgaggacgtgcctttccacagcagctacgcgcacagccagagcctggaccggctgatgaaccctctcatcgaccagtacctgtattacttatccagaactcagtccacaggaggaactcaaggtactcagcaattgttattttctcaagccgggcccgcaaacatgtcggctcaggccaagaactggctacctggaccgtgttaccgtcagcaacgagtttccacgacactgtcgcaaaacaacaacagcaattttgcttggaccggtgccaccaagtatcacctgaatggcagagactccctggttaatcccggcgttgccatggctacccacaaggacgacgaggagcgcttcttcccgtcaagcggagttctaatgtttggcaagcagggggctggaaaagacaatgtggactacagcagcgtgatgctcaccagcgaagaagaaattaaaactactaacccagtggctacagagcagtatggtgtggtggcagacaacctgcagcagaccaacggagctcccattgtgggaactgtcaacagccagggggccttacctggtatggtctggcaaaaccgggacgtgtacctgcagggccccatctgggccaaaattcctcacacggacggcaactttcatccttcgccgctgatgggaggctttggactgaaacacccgcctcctcagatcctggtgaaaaacactcctgttcctgcggatcctccgaccaccttcagccaggccaagctggcttcttttatcacgcagtacagcaccggacaggtcagcgtggaaatcgaatgggagctgcagaaagaaaacagcaagcgctggaacccagagattcagtatacttccaactactacaaatctacaaatgtggactttgctgtcaatactgagggtacttattcagagcctcgccccattggcactcgttatctcacccgtaatctgtaattgcttgttaatcaataaaccggttaattcgtttcagttgaactttggtctctgcgaagggcgaattc

SEQ ID NO: 4742 - protein, 738 aa, Adeno-associated virus
MAADGYLPDWLEDNLSEGIREWWDLKPGAPKPKANQQKQDDGRGLVLPGYKYLGPFNGLDKGEPVNAADAAALEHDKAYDQQLKAGDNPYLRYNHADAEFQERLQEDTSFGGNLGRAVFQAKKRVLEPLGLVEEGAKTAPGKKRPVEPSPQRSPDSSTGIGKKGHQPARKRLNFGQTGDSESVPDPQPIGEPPAGPSGLGSGTMAAGGGAPMADNNEGADGVGSSSGNWHCDSTWLGDRVITTSTRTWALPTYNNHLYKQISNGTSGGSTNDNTYFGYSTPWGYFDFNRFHCHFSPRDWQRLINNNWGFRPKRLNFKLFNIQVKEVTQNEGTKTIANNLTSTIQVFTDSEYQLPYVLGSAHQGCLPPFPADVFMIPQYGYLTLNNGSQAVGRSSFYCLEYFPSQMLRTGNNFEFSYTFEDVPFHSSYAHSQSLDRLMNPLIDQYLYYLSRTQSTGGTQGTQQLLFSQAGPANMSAQAKNWLPGPCYRQQRVSTTLSQNNNSNFAWTGATKYHLNGRDSLVNPGVAMATHKDDEERFFPSSGVLMFGKQGAGKDNVDYSSVMLTSEEEIKTTNPVATEQYGVVADNLQQTNGAPIVGTVNSQGALPGMVWQNRDVYLQGPIWAKIPHTDGNFHPSPLMGGFGLKHPPPQILVKNTPVPADPPTTFSQAKLASFITQYSTGQVSVEIEWELQKENSKRWNPEIQYTSNYYKSTNVDFAVNTEGTYSEPRPIGTRYLTRNL

SEQ ID NO: 4743 - DNA, 3122 bp, Adeno-associated virus
gaattcgccctttctacggctgcgtcaactggaccaatgagaactttcccttcaacgattgcgtcgacaagatggtgatctggtgggaggagggcaagatgacggccaaggtcgtggagtccgccaaggccattctcggcggcagcaaggtgcgtgtggaccaaaagtgcaagtcttccgcccagatcgatcccacccccgtgatcgtcacctccaacaccaacatgtgcgccgtgattgacgggaacagcgccaccttcgagcaccagcagccgttgcaggaccggatgttcaaatttgaactcacccgccgtctggagcatgactttggcaaggtgacgaagcaggaagtcaaagagttcttccgctgggcgcaggatcacgtgaccgaggtggcgcatgagttccacgtcagaaagggtggagccaacaagagacccgcccccgatgacgcggatataagcgagcccaagcgggcctgcccctcagtcgcggatccatcgacgtcagacgcggaaggagctccggtggactttgccgacaggtaccaaaacaaatgttctcgtcacgcgggcatgcttcagatgctgtttccctgcaagacatgcgagagaatgaatcagaatttcaacatttgcttcacgcacgggaccagagactgttcagaatgtttccccggcgtgtcagaatctcaaccggtcgtcagaaagaggacgtatcggaaactctgtgcgattcatcatctgctggggcgggctcccgagattgcttgctcggcctgcgatctggtcaacgtggacctggatgactgtgtttctgagcaataaatgacttaaaccaggtatggctgccgatggttatcttccagattggctcgaggacaacctctctgagggcattcgcgagtggtgggacttgaaacctggagccccgaaacccaaagccaaccagcaaaagcaggacgacggccggggtctggtgcttcctggctacaagtacctcggacccttcaacggactcgacaagggggagcccgtcaacgcggcggacgcagcggccctcgagcacgacaaagcctacgaccagcagctcaaagcgggtgacaatccgtacctgcggtataatcacgccgacgccgagtttcaggagcgtctgcaagaagatacgtcttttgggggcaacctcgggcgagcagtcttccaggccaagaagcgggttctcgaacctctcggtctggttgaggaaggcgctaagacggctcctggaaagaagagactggtagagcagtcgccacaagagccagactcctcctcgggcatcggcaagacaggccagcagcccgctaaaaagagactcaattttggtcagactggcgactcagagtcagtccccgacccacaacctctcggagaacctccagcagccccctcaggtctgggacctaatacaatggcttcaggcggtggcgctccaatggcagacaataacgaaggcgccgacggagtgggtaattcctcgggaaattggcattgcgattccacatggctgggggacagagtcatcaccaccagcacccgaacctgggccctgcccacctacaacaaccacctctacaagcaaatctccaacggcacctcgggaggaagcaccaacgacaacacctattttggctacagcaccccctgggggtattttgacttcaacagattccactgtcacttttcaccacgtgactggcaacgactcatcaacaacaattggggattccggcccaaaagactcaacttcaagctgttcaacatccaggtcaaggaagtcacgacgaacgaaggcaccaagaccatcgccaataatctcaccagcaccgtgcaggtctttacggactcggagtaccagttaccgtacgtgctaggatccgctcaccagggatgtctgcctccgttcccggcggacgtcttcacggttcctcagtacggctatttaactttaaacaatggaagccaagccctgggacgttcctccttctactgtctggagtatttcccatcgcagatgctgagaaccggcaacaactttcagttcagctacaccttcgaggacgtgcctttccacagcagctacgcgcacagccagagcctggacaggctgatgaatcccctcatcgaccagtacctgtactacctggtcagaacgcaaacgactggaactggagggacgcagactctggcattcagccaagcgggtcctagctcaatggccaaccaggctagaaattgggtgcccggaccttgctaccggcagcagcgcgtctccacgacaaccaaccagaacaacaacagcaactttgcctggacgggagctgccaagtttaagctgaacggccgagactctctaatgaatccgggcgtggcaatggcttcccacaaggatgacgacgaccgcttcttcccttcgagcggggtcctgatttttggcaagcaaggagccgggaacgatggagtggattacagccaagtgctgattacagatgaggaagaaatcaaggctaccaaccccgtggccacagaagaatatggagcagtggccatcaacaaccaggccgccaatacgcaggcgcagaccggactcgtgcacaaccagggggtgattcccggcatggtgtggcagaatagagacgtgtacctgcagggtcccatctgggccaaaattcctcacacggacggcaactttcacccgtctcccctgatgggcggctttggactgaagcacccgcctcctcaaattctcatcaagaacacaccggttccagcggacccgccgcttaccttcaaccaggccaagctgaactctttcatcacgcagtacagcaccggacaggtcagcgtggaaatcgagtgggagctgcagaaagaaaacagcaaacgctggaatccagagattcaatacacttccaactactacaaatctacaaatgtggactttgctgtcaacacggaaggagtttatagcgagcctcgccccattggcacccgttacctcacccgcaacctgtaattacatgttaatcaataaaccggttaattcgtttcagttgaactttggtctctgcgaagggcgaattc

SEQ ID NO: 4744 - protein, 736 aa, Adeno-associated virus
MAADGYLPDWLEDNLSEGIREWWDLKPGAPKPKANQQKQDDGRGLVLPGYKYLGPFNGLDKGEPVNAADAAALEHDKAYDQQLKAGDNPYLRYNHADAEFQERLQEDTSFGGNLGRAVFQAKKRVLEPLGLVEEGAKTAPGKKRLVEQSPQEPDSSSGIGKTGQQPAKKRLNFGQTGDSESVPDPQPLGEPPAAPSGLGPNTMASGGGAPMADNNEGADGVGNSSGNWHCDSTWLGDRVITTSTRTWALPTYNNHLYKQISNGTSGGSTNDNTYFGYSTPWGYFDFNRFHCHFSPRDWQRLINNNWGFRPKRLNFKLFNIQVKEVTTNEGTKTIANNLTSTVQVFTDSEYQLPYVLGSAHQGCLPPFPADVFTVPQYGYLTLNNGSQALGRSSFYCLEYFPSQMLRTGNNFQFSYTFEDVPFHSSYAHSQSLDRLMNPLIDQYLYYLVRTQTTGTGGTQTLAFSQAGPSSMANQARNWVPGPCYRQQRVSTTTNQNNNSNFAWTGAAKFKLNGRDSLMNPGVAMASHKDDDDRFFPSSGVLIFGKQGAGNDGVDYSQVLITDEEEIKATNPVATEEYGAVAINNQAANTQAQTGLVHNQGVIPGMVWQNRDVYLQGPIWAKIPHTDGNFHPSPLMGGFGLKHPPPQILIKNTPVPADPPLTFNQAKLNSFITQYSTGQVSVEIEWELQKENSKRWNPEIQYTSNYYKSTNVDFAVNTEGVYSEPRPIGTRYLTRNL

SEQ ID NO: 4745 - DNA, 3117 bp, Adeno-associated virus
gaattcgcccttggctgcgtcaactggaccaatgagaactttcccttcaacgattgcgtcgacaagatggtgatctggtgggaggagggcaagatgacggccaaggtcgtggagtccgccaaggccattctcggcggcagcaaggtgcgtgtggaccaaaagtgcaagtcttccgcccagatcgatcccacccccgtgatcgtcacctccaacaccaacatgtgcgccgtgattgacgggaacagcaccaccttcgagcaccagcagccgttgcaggaccggatgttcaaatttgaactcacccgccgtctggagcatgactttggcaaggtgacgaagcaggaagtcaaagagttcttccgctgggcgcaggatcacgtgaccgaggtggcgcatgagttccacgtcagaaagggtggagccaacaagagacccgcccccgatgacgcggatataagcgagcccaagcgggcctgcccctcagtcgcggatccatcgacgtcagacgcggaaggagctccggtggactttgccgacaggtaccaaaacaaatgttctcgtcacgcgggcatgcttcagatgctgtttccctgcaagacatgcgagagaatgaatcagaatttcaacatttgcttcacgcacgggaccagagactgttcagaatgtttccccggcgtgtcagaatctcaaccggtcgtcagaaagaggacgtatcggaaactctgtgcgattcatcatctgctggggcgggctcccgagattgcttgctcggcctgcgatctggtcaacgtggacctggatgactgtgtttctgagcaataaatgacttaaaccaggtatggctgccgatggttatcttccagattggctcgaggacaacctctctgagggcattcgcgagtggtgggacttgaaacctggagccccgaaacccaaagccaaccagcaaaagcaggacgacggccggggtctggtgcttcctggctacaagtacctcggacccttcaacggactcgacaagggggagcccgtcaacgcggcggacgcagcggccctcgagcacgacaaagcctacgaccagcagctcaaagcgggtgacaatccgtacctgcggtataatcacgccgacgccgagtttcaggagcgtctgcaagaagatacgtcttttgggggcaacctcgggcgagcagtcttccaggccaagaagcgggttctcgaacctctcggtctggttgaggaaggcgctaagacggctcctggaaagaagagaccggtagagcagtcgccacaagagccagactcctcctcgggcatcggcaagacaggccagcagcccgctaaaaagagactcaattttggtcagactggcgactcagagtcagtccccgacccacaacctctcggagaacctccagcagccccctcaggtctgggacctaatacaatggcttcaggcggtggcgctccaatggcagacaataacgaaggcgccgacggagtgggtaattcctcgggaaattggcattgcgattccacatggctgggggacagagtcatcaccaccagcacccgaacctgggccctgcccacctacaacaaccacctctacaagcaaatctccaacggcacctcgggaggaagcaccaacgacaacacctattttggctacagcaccccctgggggtattttgacttcaacagattccactgtcacttttcaccacgtgactggcaacgactcatcaacaacaattggggattccggcccaaaagactcaacttcaagctgttcaacatccaggtcaaggaagtcacgacgaacgaaggcaccaagaccatcgccaataatctcaccagcaccgtgcgggtctttacggactcggagtaccagttaccgtacgtgctaggatccgctcaccagggatgtctgcctccgttcccggcggacgtcttcatggttcctcagtacggctatttaactttaaacaatggaagccaagccctgggacgttcctccttctactgtctggagtatttcccatcgcagatgctgagaaccggcaacaactttcagttcagctacaccttcgaggacgtgcctttccacagcagctacgcgcacagccagagcctggacaggctgatgaatcccctcatcgaccagtacctgtactacctggtcagaacgcaaacgactggaactggagggacgcagactctggcattcagccaagcgggtcctagctcaatggccaaccaggctagaaattgggtgcccggaccttgctaccggcagcagcgcgtctccacgacaaccaaccagagcaacaacagcaactttgcctggacgggagctgccaagtttaagctgaacggccgagactctctaatgaatccgggcgtggcaatggcttcccacaaggatgacgacgaccgcttcttcccttcgagcggggtcctgatttttggcaagcaaggagccgggaacgatggagtggattacagccaagtgctgattacagatgaggaagaaatcaaggctaccaaccccgtggccacagaagaatatggagcagtggccatcaacaaccaggccgccaatacgcaggcgcagaccggactcgtgcacaaccagggggtgattcccggcatggtgtggcagaatagagacgtgtacctgcagggtcccatctgggccaaaattcctcacacggacggcaactttcacccgtctcccctgatgggcggctttggactgaagcacccgcctcctcaaattctcatcaagaacacaccggttccagcggacccgccgcttaccttcaaccaggccaagctgaactctttcatcacgcagtacagcaccggacaggtcagcgtggaaatcgagtgggagctgcagaaagaaaacagcaaacgctggaatccagagattcaatacacttccaactactacaaatctacaaatgtggactttgctgtcaacacggaaggagtttatagcgagcctcgccccattggcacccgttacctcacccgcaacctgtaattacatgttaatcaataaaccggttaattcgtttcagttgaactttggtctctgcgaagggcgaattc

SEQ ID NO: 4746 - protein, 736 aa, Adeno-associated virus
MAADGYLPDWLEDNLSEGIREWWDLKPGAPKPKANQQKQDDGRGLVLPGYKYLGPFNGLDKGEPVNAADAAALEHDKAYDQQLKAGDNPYLRYNHADAEFQERLQEDTSFGGNLGRAVFQAKKRVLEPLGLVEEGAKTAPGKKRPVEQSPQEPDSSSGIGKTGQQPAKKRLNFGQTGDSESVPDPQPLGEPPAAPSGLGPNTMASGGGAPMADNNEGADGVGNSSGNWHCDSTWLGDRVITTSTRTWALPTYNNHLYKQISNGTSGGSTNDNTYFGYSTPWGYFDFNRFHCHFSPRDWQRLINNNWGFRPKRLNFKLFNIQVKEVTTNEGTKTIANNLTSTVRVFTDSEYQLPYVLGSAHQGCLPPFPADVFMVPQYGYLTLNNGSQALGRSSFYCLEYFPSQMLRTGNNFQFSYTFEDVPFHSSYAHSQSLDRLMNPLIDQYLYYLVRTQTTGTGGTQTLAFSQAGPSSMANQARNWVPGPCYRQQRVSTTTNQSNNSNFAWTGAAKFKLNGRDSLMNPGVAMASHKDDDDRFFPSSGVLIFGKQGAGNDGVDYSQVLITDEEEIKATNPVATEEYGAVAINNQAANTQAQTGLVHNQGVIPGMVWQNRDVYLQGPIWAKIPHTDGNFHPSPLMGGFGLKHPPPQILIKNTPVPADPPLTFNQAKLNSFITQYSTGQVSVEIEWELQKENSKRWNPEIQYTSNYYKSTNVDFAVNTEGVYSEPRPIGTRYLTRNL

SEQ ID NO: 4747 - DNA, 3121 bp, Adeno-associated virus
gaattcgcccttctacggctgcgtcaactggaccaatgagaactttcccttcaacgattgcgtcgacaagatggtgatctggtgggaggagggcaagatgacggccaaggtcgtggagtccgccaaggccattctcggcggcagcaaggtgcgtgtggaccaaaagtgcaagtcttccgcccagatcgatcccacccccgtgatcgtcacctccaacaccaacatgtgcgccgtgattgacgggaacagcaccaccttcgagcaccagcagccgttgcaggaccggatgttcaaatttgaactcacccgccgtctggagcatgactttggcaaggtgacgaagcaggaagtcaaagagttcttccgctgggcgcaggatcacgtgaccgaggtggcgcatgagttccacgtcagaaagggtggcgccaacaagagacccgcccccgatgacgcggatataagcgagcccaagcgggcctgcccctcagtcgcggatccatcgacgtcagacgcggaaggagctccggtggactttgccgacaggtaccaaaacaaatgttctcgtcacgcgggcatgcttcagatgctgtttccctgcaagacatgcgagagaatgaatcagaatttcaacatttgcttcacgcacgggaccagagactgttcagaatgtttccccggcgtgtcagaatctcaaccggtcgtcagaaagaggacgtatcggaaactctgtgcgattcatcatctgctggggcgggctcccgagattgcttgctcggcctgcgatctggtcaacgtggacctggatgactgtgtttctgagcaataaatgacttaaaccaggtatggctgccgatggttatcttccagattggctcgaggacaacctctctgagggcattcgcgagtggtgggacttgaaacctggagccccgaaacccaaagccaaccagcaaaagcaggacgacggccggggtctggtgcttcctggctacaagtacctcggacccttcaacggactcgacaagggggagcccgtcaacgcggcggacgcagcggccctcgagcacgacaaagcctacgaccagcagctcaaagcgggtgacaatccgtacctgcggtataatcacgccgacgccgagtttcaggagcgtctgcaagaagatacgtcctttgggggcaacctcgggcgagcagtcttccaggccaagaagcgggttctcgaacctctcggtctggttgaggaaggcgctaagacggctcctggaaagaagagaccggtagagcagtcgccacaagagccagactcctcctcgggcatcggcaagacaggccagcagcccgctaaaaagagactcaattttggtcagactggcgactcagagtcagtccccgacccacaacctctcggagaacctccagcagccccctcaggtctgggacctaatacaatggcttcaggcggtggcgctccaatggcagacaataacgaaggcgccgacggagtgggtaattcctcgggaaattggcattgcgattccacatggctgggggacagagtcatcaccaccagcacccgaacctgggccctgcccacctacaacaaccacctctacaagcaaatctccaacggcacctcgggaggaagcaccaacgacaacacctattttggctacagcaccccctgggggtattttgacttcaacagattccactgtcacttttcaccacgtgactggcaacgactcatcaacaacaattggggattccggcccaaaagactcaacttcaagctgttcaacatccaggtcaaggaagtcacgacgaacgaaggcaccaagaccatcgccaataatctcaccagcaccgtgcaggtctttacggacttggagtaccagttaccgtacgtgctaggatccgctcaccagggatgtctgcctccgttcccggcggacgtcttcatggttcctcagtacggctatttaactttaaacaatggaagccaagccctgggacgttcctccttctactgtctggagtatttcccatcgcagatgccgagaaccggcaacaactttcagttcagctacaccttcgaggacgtgcctttccacagcagctacgcgcacagccagagcctggacaggctgatgaatcccctcatcgaccagtacctgtactacctggtcagaacgcaaacgactggaactggagggacgcagactctggcattcagccaagcgggtcctagctcaatggccaaccaggctagaaattgggtgcccggaccttgctaccggcagcagcgcgtctccacgacaaccaaccagaacaacaacagcaactttgcctggacgggagctgccaagtttaagctgaacggccgagactctctaatgaatccgggcgtggcaatggcttcccacaaggatgacgacgaccgcttcttcccttcgagcggggtcctgatttttggcaagcaaggagccgggaacgatggagtggattacagccaagtgctgattacagatgaggaagaaatcaaggctaccaaccccgtggccacagaagaatatggagcagtggccatcaacaaccaggccgccaatacgcaggcgcagaccggactcgtgcacaaccagggggtgattcccggcatggtgtggcagaatagagacgtgtacctgcagggtcccatctgggccaaaattcctcacacggacggcaactttcacccgtctcccctgatgggcggctttggactgaagcacccgcctcctcaaattctcatcaagaacacaccggttccagcggacccgccgcttaccttcaaccaggccaagctgaactctttcatcacgcagtacagcaccggacaggtcagcgtggaaatcgagtgggagctgcagaaagaaaacagcaaacgctggaatccagagattcaatacacttccaactactacaaatctacaaatgtggactttgctgtcaacacggaaggagtttatagcgagcctcgccccattggcacccgttacctcacccgcaacctgtaattacatgttaatcaataaaccggttaattcgtttcagttgaactttggtctctgcgaagggcgaattc

SEQ ID NO: 4748 - protein, 736 aa, Adeno-associated virus
MAADGYLPDWLEDNLSEGIREWWDLKPGAPKPKANQQKQDDGRGLVLPGYKYLGPFNGLDKGEPVNAADAAALEHDKAYDQQLKAGDNPYLRYNHADAEFQERLQEDTSFGGNLGRAVFQAKKRVLEPLGLVEEGAKTAPGKKRPVEQSPQEPDSSSGIGKTGQQPAKKRLNFGQTGDSESVPDPQPLGEPPAAPSGLGPNTMASGGGAPMADNNEGADGVGNSSGNWHCDSTWLGDRVITTSTRTWALPTYNNHLYKQISNGTSGGSTNDNTYFGYSTPWGYFDFNRFHCHFSPRDWQRLINNNWGFRPKRLNFKLFNIQVKEVTTNEGTKTIANNLTSTVQVFTDLEYQLPYVLGSAHQGCLPPFPADVFMVPQYGYLTLNNGSQALGRSSFYCLEYFPSQMPRTGNNFQFSYTFEDVPFHSSYAHSQSLDRLMNPLIDQYLYYLVRTQTTGTGGTQTLAFSQAGPSSMANQARNWVPGPCYRQQRVSTTTNQNNNSNFAWTGAAKFKLNGRDSLMNPGVAMASHKDDDDRFFPSSGVLIFGKQGAGNDGVDYSQVLITDEEEIKATNPVATEEYGAVAINNQAANTQAQTGLVHNQGVIPGMVWQNRDVYLQGPIWAKIPHTDGNFHPSPLMGGFGLKHPPPQILIKNTPVPADPPLTFNQAKLNSFITQYSTGQVSVEIEWELQKENSKRWNPEIQYTSNYYKSTNVDFAVNTEGVYSEPRPIGTRYLTRNL

SEQ ID NO: 4749 - DNA, 3122 bp, Adeno-associated virus
gaattcgccctttctacggctgcgtcaactggaccaatgagaactttcccttcaacgattgcgtcgacaagatggtgatctggtgggaggagggcaagatgacggccaaggtcgtggagtccgccaaggccattctcggcggcagcaaggtgcgtgtggaccaaaagtgcaagtcttccgcccagatcgatcccacccccgtgatcgtcacctccaacaccaacatgtgcgccgtgattgacgggaacagcaccaccttcgagcaccagcagccgttgcaggaccggatgttcaaatttgaactcacccgccgtctggagcatgactttggcaaggtgacgaagcaggaagtcaaagggttcttccgctgggcgcaggatcacgtgaccgaggtggcgcatgagttccacgtgcgagcccaagcgggcctgcccctcagtcgcggatccatcgacgtcagaccagaaagggtggagccaacaagagacccgcccccgatgacgcggatataagcggaaggagctccggtggactttgccgacaggtaccaaaacaaatgttctcgtcacgcgggcatgcttcagatgctgtttccctgcaagacatgcgagagaatgaatcagaatttcaacatttgcttcacgcacgggaccagagactgttcagaatgtttccccggcgtgtcagaatctcaaccggtcgtcagaaagaggacgtatcggaaactctgtgcgattcatcatctgctggggcgggctcccgagattgcttgctcggcctgcgatctggtcaacgtggacctggatgactgtgtttctgagcaataaatgacttaaaccaggtatggctgccgatggttatcttccagattggctcgaggacaacctctctgagggcattcgcgagtggtgggacttgaaacctggagccccgaaacccaaagccaaccagcaaaagcaggacgacggccggggtctggtgcttcctggctacaagtacctcggacccttcaacggactcgacaagggggagcccgtcaacgcggcggacgcagcggccctcgagcacgacaaagcctacgaccagcagctcaaagcgggtgacaatccgtacctgcggtataatcacgccgacgccgagtttcaggagcgtctgcaagaagatacgtcttttgggggcaacctcgggcgagcagtcttccaggccaagaagcgggttctcgaacctctcggtctggttgaggaaggcgctaagacggctcctggaaagaagagaccggtagagcagtcgccacaagagccagactcctcctcgggcatcggcaagacaggccagcagcccgctaaaaagagactcaattttggtcagactggcgactcagagtcagtccccgacccacaacctctcggagaacctccagcagccccctcaggtctgggacctaatacaatggcttcaggcggtggcgctccaatggcagacaataacgaaggcgccgacggagtgggtaattcctcgggaaattggcattgcgattccacatggctgggggacagagtcatcaccaccagcacccgaacctgggccctgcccacctacaacaaccacctctacaagcaaatctccaacggcacctcgggaggaagcaccaacgacaacacctattttggctacagcaccccctgggggtattttgacttcaacagattccactgtcacttttcaccacgtgactggcaacgactcatcaacaacaattggggattccggcccaaaagactcaacttcaagctgttcaacatccaggtcaaggaagtcacgacgaacgaaggcaccaagaccatcgccaataatctcaccagcaccgtgcaggtctttacggactcggagtaccagttaccgtacgtgctaggatccgctcaccagggatgtctgcctccgttcccggcggacgtcttcatggttcctcagtacggctatttaactttaaacaatggaagccaagccctgggacgttcctccttctactgtctggagtatttcccatcgcagatgctgagaaccggcaacaactttcagttcagctacaccttcgaggacgtgcctttccacagcagctacgcgcacagccagagcctggacaggctgatgaatcccctcatcgaccagtacctgtactacctggtcagaacgcaaacgactggaactggagggacgcagactctggcattcagccaagcgggtcctagctcaatggccaaccaggctagaaattgggtgcccggaccttgctaccggcagcagcgcgtctccacgacaaccaaccagaacaacaacagcaactttgcctggacgggagctgccaagtttaagctgaacggccgagactctctaatgaatccgggcgtggcaatggcttcccacaaggatgacgacgaccgcttcttcccttcgagcggggtcctgatttttggcaagcaaggagccgggaacgatggagtggattacagccaagtgctgattacagatgaggaagaaatcaaggctaccaaccccgtggccacagaagaatatggagcagtggccatcaacaaccaggccgccaatacgcaggcgcagaccggactcgtgcacaaccagggggtgattcccggcatggtgtggcagaatagagacgtgtacctgcagggtcccatctgggccaaaattcctcacacggacggcaactttcacccgtctcccctgatgggcggctttggactgaagcacccgcctcctcaaattctcatcaagaacacaccggttccagcggacccgccgcttaccttcaaccaggccaagctgaactctttcatcacgcagtacagcaccggacaggtcagcgtggaaatcgagtgggagctgcagaaagaaaacagcaaacgctggaatccagagattcaatacacttccaactactacaaatctacaaatgtggactttgctgtcaacacggagggggtttatagcgagcctcgccccattggcacccgttacctcacccgcaacctgtaattacatgttaatcaataaaccggttaattcgtttcagttgaactttggtctctgcgaagggcgaattc

SEQ ID NO: 4750 - protein, 736 aa, Adeno-associated virus
MAADGYLPDWLEDNLSEGIREWWDLKPGAPKPKANQQKQDDGRGLVLPGYKYLGPFNGLDKGEPVNAADAAALEHDKAYDQQLKAGDNPYLRYNHADAEFQERLQEDTSFGGNLGRAVFQAKKRVLEPLGLVEEGAKTAPGKKRPVEQSPQEPDSSSGIGKTGQQPAKKRLNFGQTGDSESVPDPQPLGEPPAAPSGLGPNTMASGGGAPMADNNEGADGVGNSSGNWHCDSTWLGDRVITTSTRTWALPTYNNHLYKQISNGTSGGSTNDNTYFGYSTPWGYFDFNRFHCHFSPRDWQRLINNNWGFRPKRLNFKLFNIQVKEVTTNEGTKTIANNLTSTVQVFTDSEYQLPYVLGSAHQGCLPPFPADVFMVPQYGYLTLNNGSQALGRSSFYCLEYFPSQMLRTGNNFQFSYTFEDVPFHSSYAHSQSLDRLMNPLIDQYLYYLVRTQTTGTGGTQTLAFSQAGPSSMANQARNWVPGPCYRQQRVSTTTNQNNNSNFAWTGAAKFKLNGRDSLMNPGVAMASHKDDDDRFFPSSGVLIFGKQGAGNDGVDYSQVLITDEEEIKATNPVATEEYGAVAINNQAANTQAQTGLVHNQGVIPGMVWQNRDVYLQGPIWAKIPHTDGNFHPSPLMGGFGLKHPPPQILIKNTPVPADPPLTFNQAKLNSFITQYSTGQVSVEIEWELQKENSKRWNPEIQYTSNYYKSTNVDFAVNTEGVYSEPRPIGTRYLTRNL

SEQ ID NO: 4751 - DNA, 2370 bp, Adeno-associated virus
gaattcgccctttctacggctgcgtcaactggaccaatgagaactttcccttcaacgattgcgtcgacaagatggtgatctggtgggaggagggcaagatgacggccaaggtcgtggagtccgccaaggccattctcggcggcagcaaggtgcgcgtggaccaaaagtgcaagtcgtccgcccagatcgaccccacccccgtgatcgtcacctccaacaccaacatgtgcgccgtgattgacgggaacagcaccaccttcgagcaccagcagccgttgcaggaccggatgttcaagttcgaactcacccgccgtctggagcacgactttggcaaggtgaccaagcaggaagtcaaagagttcttccgctgggcgcaggatcacgtgaccgaggtggcgcatgagttctacgtcagaaagggcggagccagcaaaagacccgcccccgatgacgcggatataagcgagcccaagcgggcctgcccctcagtcgcggatccatcgacgtcagacgcggaaggagctccggtggactttgccgacaggtaccaaaacaaatgttctcgtcacgcgggcatgcttcagacgctgtttccctgcaaaacgtgcgagagaatgaatcagaatttcaacatttgcttcacgcacggggtcagagactgctcagaatgtttccccggtgcatcagaatctcaaccggtcgtcagaaaaaaaacgtatcagaaactgtgtgccattcatcatctgctggggcgggcacccgagattgcttgctcggcctgcgatctggtcaacgtggacctggacgactgtgtttctgagcaataaatgacttaaaccaggtatggctgccgatggttatcttccagattggcttgaggacaacctctctgagggcattcgcgagtggtgggacctgaaacctggagccccgaaacccaaagccaaccagcaaaagcaggacgacggccggggtctggtgcttcctggctacaagtacctcggacccttcaacggactcgacaagggggagcccgtcaacgcggcggacgcagcggccctcgagcacgacaaggcctacgaccagcagctcaaagcgggtgacaatccgtacctgcggtataaccacgccgacgccgagtttcaggagcgtctgcaagaagatacgtcttttgggggcaacctcgggcgagcagtcttccaggccaagaagcgggttctcgaacctctcggtctggttgaggaaggcgctaagacggctcctggaaagaagagaccggtagagccatcacctcagcgttcccccgactcctccacgggcatcggcaagaaaggccaccagcccgcgagaaagagactgaactttgggcagactggcgactcggagtcagtccccgaccctcaaccaatcggagaaccaccagcaggcccctctggtctgggatctggtacaatggctgcaggcggtggcgctccaatggcagacaataacgaaggcgccgacggagtgggtagttcctcaggaaattggcattgcgattccacatggctgggcgacagagtcatcaccaccagcacccgaacctgggccctgcccacctacaacaaccatctctacaagcaaatctccaacgggacatcgggaggaagcactaacgacaacacctactttggctacagcaccccctgggggtattttgacttcaacagattccactgccacttctcaccacgtgactggcagcgactcatcaacaataactggggattccggcccaagagactcaacttcaagctcttcaacatccaggtcaaggaggtcacgcagaatgaaggcaccaagaccatcgccaataaccttaccagcacgattcaggtgtttacggactcggaataccagctcccgtacgtcctcggctctgcgcaccagggctgcctccctccgttcccggcggacgtcttcatgattcctcagtacgggtatctgaccctaaacaatggcagtcaggctgtgggccgttcctccttctactgcctggaatacttcccttctcaaatgctgaggacgggcaacaactttgaattcagctacaccttcgaggacgtgcctttccacagcagctacgcgcacagccagagcctggaccggctgatgaaccctctcatcgaccagtacctgtattacttatccagaactcagtccacaggaggaactcaaggtactcagcaattgttattttctcaagccgggcccgcaaacatgtyggctcaggccaagaactggctacctggaccgtgttaccgtcagcaacgagtttccacgacactgtcgcaaaacaacaacagcaattttgctggaccggtgccacca

SEQ ID NO: 4752 - protein, 738 aa, Adeno-associated virus; identical to SEQ ID NO: 4742

SEQ ID NO: 4753 - DNA, 2205 bp, Adeno-associated virus
atgactgacggttaccttccagattggctagaggacaacctctctgaaggcgttcgagagtggtgggcgctgcaacctggagcccctaaacccaaggcaaatcaacaacatcaggacaacgctcggggtcttgtgcttccgggttacaaatacctcggacccggcaacggactcgacaagggggaacccgtcaacgcagcggacgcggcagccctcgagcacgacaaggcctacgaccagcagctcaaggccggtgacaacccctacctcaagtacaaccacgccgacgcggagttccagcagcggcttcagggcgacacatcgtttgggggcaacctcggcagagcagtcttccaggccaaaaagagggttcttgaacctcttggtctggttgagcaagcgggtgagacggctcctggaaagaagagaccgttgattgaatccccccagcagcccgactcctccacgggtatcggcaaaaaaggcaagcagccggctaaaaagaagctcgttttcgaagacgaaactggagcaggcgacggaccccctgagggatcaacttccggagccatgtctgatgacagtgagatgcgtgcagcagctggcggagctgcagtcgagggcggacaaggtgccgatggagtgggtaatgcctcgggtgattggcattgcgattccacctggtctgagggccacgtcacgaccaccagcaccagaacctgggtcttgcccacctacaacaaccacctctacaagcgactcggagagagcctgcagtccaacacctacaacggattctccaccccctggggatactttgacttcaaccgcttccactgccacttctcaccacgtgactggcagcgactcatcaacaacaactggggcatgcgacccaaagccatgcgggtcaaaatcttcaacatccaggtcaaggaggtcacgacgtcgaacggcgagacaacggtggctaataaccttaccagcacggttcagatctttgcggactcgtcgtacgaactgccgtacgtgatggatgcgggtcaagagggcagcctgcctccttttcccaacgacgtctttatggtgccccagtacggctactgtggactggtgaccggcaacacttcgcagcaacagactgacagaaatgccttctactgcctggagtactttccttcgcagatgctgcggactggcaacaactttgaaattacgtacagttttgagaaggtgcctttccactcgatgtacgcgcacagccagagcctggaccggctgatgaaccctctcatcgaccagtacctgtggggactgcaatcgaccaccaccggaaccaccctgaatgccgggactgccaccaccaactttaccaagctgcggcctaccaacttttccaactttaaaaagaactggctgcccgggccttcaatcaagcagcagggcttctcaaagactgccaatcaaaactacaagatccctgccaccgggtcagacagtctcatcaaatacgagacgcacagcactctggacggaagatggagtgccctgacccccggacctccaatggccacggctggacctgcggacagcaagttcagcaacagccagctcatctttgcggggcctaaacagaacggcaacacggccaccgtacccgggactctgatcttcacctctgaggaggagctggcagccaccaacgccaccgatacggacatgtggggcaacctacctggcggtgaccagagcaacagcaacctgccgaccgtggacagactgacagccttgggagccgtgcctggaatggtctggcaaaacagagacatttactaccagggtcccatttgggccaagattcctcataccgatggacactttcacccctcaccgctgattggtgggtttgggctgaaacacccgcctcctcaaatttttatcaagaacaccccggtacctgcgaatcctgcaacgaccttcagctctactccggtaaactccttcattactcagtacagcactggccaggtgtcggtgcagattgactgggagatccagaaggagcggtccaaacgctggaaccccgaggtccagtttacctccaactacggacagcaaaactctctgttgtgggctcccgatgcggctgggaaatacactgagcctagggctatcggtacccgctacctcacccaccacctgtaa

SEQ ID NO: 4754 - protein, 734 aa, Adeno-associated virus
MTDGYLPDWLEDNLSEGVREWWALQPGAPKPKANQQHQDNARGLVLPGYKYLGPGNGLDKGEPVNAADAAALEHDKAYDQQLKAGDNPYLKYNHADAEFQQRLQGDTSFGGNLGRAVFQAKKRVLEPLGLVEQAGETAPGKKRPLIESPQQPDSSTGIGKKGKQPAKKKLVFEDETGAGDGPPEGSTSGAMSDDSEMRAAAGGAAVEGGQGADGVGNASGDWHCDSTWSEGHVTTTSTRTWVLPTYNNHLYKRLGESLQSNTYNGFSTPWGYFDFNRFHCHFSPRDWQRLINNNWGMRPKAMRVKIFNIQVKEVTTSNGETTVANNLTSTVQIFADSSYELPYVMDAGQEGSLPPFPNDVFMVPQYGYCGLVTGNTSQQQTDRNAFYCLEYFPSQMLRTGNNFEITYSFEKVPFHSMYAHSQSLDRLMNPLIDQYLWGLQSTTTGTTLNAGTATTNFTKLRPTNFSNFKKNWLPGPSIKQQGFSKTANQNYKIPATGSDSLIKYETHSTLDGRWSALTPGPPMATAGPADSKFSNSQLIFAGPKQNGNTATVPGTLIFTSEEELAATNATDTDMWGNLPGGDQSNSNLPTVDRLTALGAVPGMVWQNRDIYYQGPIWAKIPHTDGHFHPSPLIGGFGLKHPPPQIFIKNTPVPANPATTFSSTPVNSFITQYSTGQVSVQIDWEIQKERSKRWNPEVQFTSNYGQQNSLLWAPDAAGKYTEPRAIGTRYLTHHL

SEQ ID NO: 4755 - DNA, 3128 bp, Adeno-associated virus
gaattcgccctttctacggctgcgtcaactggaccaatgagaactttcccttcaacgattgcgtcgacaagatgttgatctggtgggaggagggcaagatgacggccaaggtcgtggagtccgccaaggccattctcggcggcagcaaagtgcgcgtggaccaaaagtgcaagccgtccgcccagatcgaccccacccccgtgatcgtcacctccaacaccaacatgtgcgccgtgattgacgggaacagcaccaccttcgagcaccagcagccgttgcgggaccggatgttcaagtttgaactcacccgccgtctggagcacgactttggcaaggtgacaaagcaggaagtcagagagttcttccgctgggcgcaggatcacgtgaccgaggtggcgcacgagttctacgtcagaaagggtggagccaacaagagacccgcccccgatgacgcggataaaagcgagcccaagcgggcctgcccctcagtcgcggatccatcgacgtcagacgcggaaggagctccggtggactttgccgacaggtaccaaaacaaatgttctcgtcacgcgggcatgcttcagatgctgtttccctgcaaaacatgcgagagaatgaatcagaatttcaacatttgcttcacgcacgggaccagagactgttcagaatgtttccccggcgtgtcagaatctcaaccggtcgtcagaaaaaagacgtatcggaaactctgtgcgattcatcatctgctggggcgggcacccgagattgcttgctcggcctgcgatctggtcaacgtggacctagatgactgtgtttctgagcaataaatgacttaaaccaggtatggctgccgatggttatcttccagattggctcgaggacaacctctctgagggcattcgcgagtggtgggacttgaaacctggagccccgaaacccaaagccaaccagcaaaagcaggacgacggccggggtctggtgcttcctggctacaagtacctcggacccttcaacggactcgacaagggggagcccgtcaacgcggcggacgcagcggccctcgagcacgacaaggcctacgaccagcagctcaaagcgggtgacaatccgtacctgcggtataaccacgccgacgccgagtttcaggagcgtctgcaagaagatacgtcttttgggggcaacctcgggcgagcagtcttccaggccaagaagcgggttctcgaacctctcggtctggttgaggaaggcgctaagacggctcctggaaagaagagaccggtagagccatcaccccagcgttctccagactcctctacgggcatcggcaagaaaggccagcagcccgcgaaaaagagactcaactttgggcagactggcgactcagagtcagtgcccgaccctcaaccaatcggagaaccccccgcaggcccctctggtctgggatctggtacaatggctgcaggcggtggcgctccaatggcagacaataacgaaggcgccgacggagtgggtagttcctcaggaaattggcattgcgattccacatggctgggcgacagagtcatcaccaccagcacccgaacctgggccctccccacctacaacaaccacctctacaagcaaatctccaacgggacttcgggaggaagcaccaacgacaacacctacttcggctacagcaccccctgggggtattttgactttaacagattccactgccacttctcaccacgtgactggcagcgactcatcaacaacaactggggattccggcccaagagactcaacttcaagctcttcaacatccaggtcaaggaggtcacgcagaatgaaggcaccaagaccatcgccaataaccttaccagcacgattcaggtctttacggactcggaataccagctcccgtacgtcctcggctctgcgcaccagggctgcctgcctccgttcccggcggacgtcttcatgattcctcagtacgggtacctgactctgaacaatggcagtcaggccgtgggccgttcctccttctactgcctggagtactttccttctcaaatgctgagaacgggcaacaactttgagttcagctaccagtttgaggacgtgccttttcacagcagctacgcgcacagccaaagcctggaccggctgatgaaccccctcatcgaccagtacctgtactacctgtctcggactcagtccacgggaggtaccgcaggaactcagcagttgctattttctcaggccgggcctaataacatgtcggctcaggccaaaaactggctacccgggccctgctaccggcagcaacgcgtctccacgacactgtcgcaaaataacaacagcaactgtaaatcccggtgtcgctatggcaacccacaaggacgacgaagagcgattttgcctggaccggtgccaccaagtatcatctgaatggcagagactctctgttttccgtccagcggagtcttaatgtttgggaaacagggagctggaaaagacaacgtggactatagcagcgttatgctaaccagtgaggaagaaattaaaaccaccaacccagtggccacggaacagtacggcgtggtggccgataacctgcaacagcaaaacgccgctcctattgtaggggccgtcaacagtcaaggagccttacctggcatggtctggcagaaccgggacgtgtacctgcagggtcctatctgggccaagattcctcacacggacggaaactttcatccctcgccgctgatgggaggctttggactgaaacacccgcctcctcagatcctgattaagaatacacctgttcccgcggatcctccaactaccttcagtcaagctaagctggcgtcgttcatcacgcagtacagcaccggacaggtcagcgtggaaattgaatgggagctgcagaaagaaaacagcaaacgctggaacccagagattcaatacacttccaactactacaaatctacaaatgtggacttcgctgttaacacagatggcacttattctgagcctcgccccattggcacccgttacctcacccgtaatctgtaattgctcgttaatcaataaaccggttgattcgtttcagttgaactttggtctctgcgaagggcgaattc

SEQ ID NO: 4756 - protein, 738 aa, Adeno-associated virus
MAADGYLPDWLEDNLSEGIREWWDLKPGAPKPKANQQKQDDGRGLVLPGYKYLGPFNGLDKGEPVNAADAAALEHDKAYDQQLKAGDNPYLRYNHADAEFQERLQEDTSFGGNLGRAVFQAKKRVLEPLGLVEEGAKTAPGKKRPVEPSPQRSPDSSTGIGKKGQQPAKKRLNFGQTGDSESVPDPQPIGEPPAGPSGLGSGTMAAGGGAPMADNNEGADGVGSSSGNWHCDSTWLGDRVITTSTRTWALPTYNNHLYKQISNGTSGGSTNDNTYFGYSTPWGYFDFNRFHCHFSPRDWQRLINNNWGFRPKRLNFKLFNIQVKEVTQNEGTKTIANNLTSTIQVFTDSEYQLPYVLGSAHQGCLPPFPADVFMIPQYGYLTLNNGSQAVGRSSFYCLEYFPSQMLRTGNNFEFSYQFEDVPFHSSYAHSQSLDRLMNPLIDQYLYYLSRTQSTGGTAGTQQLLFSQAGPNNMSAQAKNWLPGPCYRQQRVSTTLSQNNNSNFAWTGATKYHLNGRDSLVNPGVAMATHKDDEERFFPSSGVLMFGKQGAGKDNVDYSSVMLTSEEEIKTTNPVATEQYGVVADNLQQQNAAPIVGAVNSQGALPGMVWQNRDVYLQGPIWAKIPHTDGNFHPSPLMGGFGLKHPPPQILIKNTPVPADPPTTFSQAKLASFITQYSTGQVSVEIEWELQKENSKRWNPEIQYTSNYYKSTNVDFAVNTDGTYSEPRPIGTRYLTRNL

SEQ ID NO: 4757 - DNA, 3129 bp, Adeno-associated virus
gaattcgccctttctacggctgcgtcaactggaccaatgagaactttcccttcaacgattgcgtcgacaagatggtgatctggtgggaggagggcaagatgacggccaaggtcgtggagtccgccaaggccattctcggcggcagcaaagtgcgcgtggaccaaaagtgcaagtcgtccgcccagatcgaccccacccccgtgatcgtcacctccaacaccaacatgtgcgccgtgattgacgggaacagcaccaccttcgagcaccagcagccgttgcaggaccggatgttcaagtttgaactcacccgccgtctggagcacgactttggcaaggtgacaaagcaggaagtcagagagttcttccgctgggcgcaggatcacgtgaccgaggtggcgcacgagttctacgtcagaaagggtggagccaacaagagacccgcccccgatgacgcggataaaagcgagcccaagcgggcctgcccctcagtcgcggatccatcgacgtcagacgcggaaggagctccggtggactttgccgacaggtaccaaaacaaatgttctcgtcacgcgggcatgcttcagatgctgtttccctgcaaaacatgcgagagaatgaatcagaatttcaacatttgcttcacgcacgggaccagagactgttcagaatgtttccccggcgtgtcagaatctcaaccggtcgtcagaaaaaagacgtatcggaaactctgtgcgattcatcatctgctgggggcgggcacccgagattgcttgctcggcctgcgatctggtcaacgtggacctagatgactgtgtttctgagcaataaatgacttaaaccaggtatggctgccgatggttatcttccagattggctcgaggacaacctctctgagggcattcgcgagtggtgggacttgaaacctggagccccgaaacccaaagccaaccagcaaaagcaggacgacggccggggtctggtgcttcctggctacaagtacctcggacccttcaacggactcgacaagggggagcccgtcaacgcggcggacgcagcggccctcgagcacgacaaggcctacgaccagcagctcaaagcgggtgacaatccgtacctgcggtataaccacgccgacgccgagtttcaggagcgtctgcaagaagatacgtcttttgggggcaacctcgggcgagcagtcttccaggccaagaagcgggttctcgaacctctcggtctggttgaggaaggcgctaagacggctcctggaaagaagagaccggtagagccatcaccccagcgttctccagactcctctacgggcatcggcaagaaaggccagcagcccgcgaaaaagagactcaactttgggcagactggcgactcagagtcagtgcccgaccctcaaccaatcggagaaccccccgcaggcccctctggtctgggatctggtacaatggctgcaggcggtggcgctccaatggcagacaataacgaaggcgccgacggagtgggtagttcctcaggaaattggcattgcgattccacatggctgggcgacagagtcatcaccaccagcacccgaacctgggccctccccacctacaacaaccacctctacaagcaaatctccaacgggacttcgggaggaagcaccaacgacaacacctacttcggctacagcaccccctgggggtattttgactttaacagattccactgccacttctcaccacgtgactggcagcgactcatcaacaacaactggggattccggcccaagagactcaacttcaagctcttcaacatccaggtcaaggaggtcacgcagaatgaaggcaccaagaccatcgccaataaccttaccagcacgattcaggtctttacggactcggaataccagctcccgtacgtcctcggctctgcgcaccagggctgcctgcctccgttcccggcggacgtcttcatgattcctcagtacgggtacctgactctgaacaatggcagtcaggccgtgggccgttcctccttctactgcctggagtactttccttctcaaatgctgagaacgggcaacaactttgagttcagctaccagtttgaggacgtgccttttcacagcagctacgcgcacagccaaagcctggaccggctgatgaaccccctcatcgaccagtacctgtactacctgtctcggactcagtccacgggaggtaccgcaggaactcagcagttgctattttctcaggccgggcctaataacatgtcggctcaggccaaaaactggctacccgggccctgctaccggcagcaacgcgtctccacgacactgtcgcaaaataacaacagcaactttgcctggaccggtgccaccaagtatcatctgaatggcagagactctctggtaaatcccggtgtcgctatggcaacccacaaggacgacgaagagcgattttttccgtccagcggagtcttaatgtttgggaaacagggagctggaaaagacaacgtggactatagcagcgttatgctaaccagtgaggaagaaattaaaaccaccaacccagtggccacagaacagtacggcgtggtggccgataacctgcaacagcaaaacgccgctcctattgtaggggccgtcaacagtcaaggagccttacctggcatggtctggcagaaccgggacgtgtacctgcagggtcctatctgggccaagattcctcacacggacggaaactttcatccctcgccgctgatgggaggctttggactgaaacacccgcctcctcagatcctgattaagaatacacctgttcccgcggatcctccaactaccttcagtcaagctaagctggcgtcgttcatcacgcagtacagcaccggacaggtcagcgtggaaattgaatgggagctgcagaaagaaaacagcaaacgctggaacccagagattcaatacacttccaactactacaaatctacaaatgtggactttgctgttaacacagatggcacttattctgagcctcgccccatcggcacccgttacctcacccgtaatctgtaattgcttgttaatcaataaaccggttgattcgtttcagttgaactttggtctctgcgaagggcgaattc

SEQ ID NO: 4758 - DNA, 3128 bp, Adeno-associated virus
gaattcgccctttctacggctgcgtcaactggaccaatgagaactttcccttcaacgattgcgtcgacaagatggtgatctggtgggaggagggcaagatgacggccaaggtcgtggagtccgccaaggccattctcggcggcagcaaagtgcgcgtggaccaaaagtgcaagtcgtccgcccagatcgaccccacccccgtgatcgtcacctccaacaccaacatgtgcgccgtgattgacgggaacagcaccaccttcgagcaccagcagccgttgcaggaccggatgttcaagtttgaactcacccgccgtctggagcacgactttggcaaggtgacaaagcaggaagtcagagagttcttccgctgggcgcaggatcacgtgaccgaggtggcgcacgagttctacgtcagaaagggtggagccaacaagagacccgcccccgatgacgcggataaaagcgagcccaagcgggcctgcccctcagtcgcggatccatcgacgtcagacgcggaaggagctccggtggactttgccgacaggtaccaaaacaaatgttctcgtcacgcgggcatgcttcagatgctgtttccctgcaaaacatgcgagagaatgaatcagaatttcaacatttgcttcacgcacgggaccagagactgttcagaatgtttccccggcgtgtcagaatctcaaccggttgtcagaaaaaagacgtatcggaaactctgtgcgattcatcatctgctggggcgggcacccgagattgcttgctcggcctgcgatctggtcaacgtggacctagatgactgtgtttctgagcaataaatgacttaaaccaggtatggctgccgatggttatcttccagattggctcgaggacaacctctctgagggcattcgcgagtggtgggacttgaaacctggagccccgaaacccaaagccaaccagcaaaagcaggacgacggccggggtctggtgcttcctggctacaagtacctcggacccttcaacggactcgacaagggggagcccgtcaacgcggcggacgcagcggccctcgagcacgacaaggcctacgaccagcagctcaaagcgggtgacaatccgtacctgcggtataaccacgccgacgccgagtttcaggagcgtctgcaagaagatacgtcttttgggggcaacctcgggcgagcagtcttccaggccaagaagcgggttctcgaacctctcggtctggttgaggaaggcgctaagacggctcctggaaagaagagaccggtagagccatcaccccagcgttctccagactcctctacgggcatcggcaagaaaggccagcagcccgcgaaaaagagactcaactttgggcagactggcgactcagagtcagtgcccgaccctcaaccaatcggagaaccccccgcaggcccctctggtctgggatctggtacaatggctgcaggcggtggcgctccaatggcagacaataacgaaggcgccgacggagtgggtagttcctcaggaaattggcattgcgattccacatggctgggcgacagagtcatcaccaccagcacccgaacctgggccctccccacctacaacaaccacctctacaagcaaatctccaacgggacttcgggaggaagcaccaacgacaacacctacttcggctacagcaccccctgggggtattttgactttaacagattccactgccacttctcaccacgtgactggcagcgactcatcaacaacaactggggattccggcccaagagacccaacttcaagctcttcaacatccaggtcaaggaggtcacgcagaatgaaggcaccaagaccatcgccaataaccttaccagcacgattcaggtctttacggactcggaataccagctcccgtacgtcctcggctctgcgcaccagggctgcctgcctccgttcccggcggacgtcttcatgattcctcagtacgggtacctgactctgaacaatggcagtcaggccgtgggccgttcctccttctactgcctggagtactttccttctcaaatgctgagaacgggcaacaactttgagttcagctaccagtttgaggacgtgccttttcacagcagctacgcgcacagccaaagcctggaccggctgatgaaccccctcatcgaccagtacctgtactacctgtctcggactcagtccacgggaggtaccgcaggaactcagcagttgctattttctcaggccgggcctaataacatgtcggctcaggccaaaaactggctacccgggccctgctaccggcagcaacgcgtctccacgacactgtcgcaaaataacaacagcaactttgcctggaccggtgccaccaagtatcatctgaatggcagagactctctggtaaatcccggtgtcgctatggcaacccacaaggacgacgaagagcgattttttccgtccagcggagtcttaatgtttgggaaacagggagctggaaaagacaacgtggactatagcagcgttatgctaaccagtgaggaagaaattaaaaccaccaacccagtggccacagaacagtacggcgtggtggccgataacctgcaacagcaaaacgccgctcctattgtaggggccgtcaacagtcaaggagccttacctggcatggtctggcagaaccgggacgtgtacctgcagggtcctatctgggccaagattcctcacacggacggaaactttcatccctcgccgctgatgggaggctttggactgaaacacccgcctcctcagatcctgattaagaatacacctgttcccgcggatcctccaactaccttcagtcaagctaagctggcgtcgttcatcacgcagtacagcaccggacaggtcagcgtggaaattgaatgggagctgcagaaagaaaacagcaaacgctggaacccagagattcaatacacttccaactactacaaatctacaaatgtggactttgctgttaacacagatggcacttattctgagcctcgccccattggcacccgttacctcacccgtaatctgtaattgcttgttaatcaataaaccggttgattcgtttcagttgaactttggtctctgcgaagggcgaattc

SEQ ID NO: 4759 - protein, 738 aa, Adeno-associated virus
MAADGYLPDWLEDNLSEGIREWWDLKPGAPKPKANQQKQDDGRGLVLPGYKYLGPFNGLDKGEPVNAADAAALEHDKAYDQQLKAGDNPYLRYNHADAEFQERLQEDTSFGGNLGRAVFQAKKRVLEPLGLVEEGAKTAPGKKRPVEPSPQRSPDSSTGIGKKGQQPAKKRLNFGQTGDSESVPDPQPIGEPPAGPSGLGSGTMAAGGGAPMADNNEGADGVGSSSGNWHCDSTWLGDRVITTSTRTWALPTYNNHLYKQISNGTSGGSTNDNTYFGYSTPWGYFDFNRFHCHFSPRDWQRLINNNWGFRPKRPNFKLFNIQVKEVTQNEGTKTIANNLTSTIQVFTDSEYQLPYVLGSAHQGCLPPFPADVFMIPQYGYLTLNNGSQAVGRSSFYCLEYFPSQMLRTGNNFEFSYQFEDVPFHSSYAHSQSLDRLMNPLIDQYLYYLSRTQSTGGTAGTQQLLFSQAGPNNMSAQAKNWLPGPCYRQQRVSTTLSQNNNSNFAWTGATKYHLNGRDSLVNPGVAMATHKDDEERFFPSSGVLMFGKQGAGKDNVDYSSVMLTSEEEIKTTNPVATEQYGVVADNLQQQNAAPIVGAVNSQGALPGMVWQNRDVYLQGPIWAKIPHTDGNFHPSPLMGGFGLKHPPPQILIKNTPVPADPPTTFSQAKLASFITQYSTGQVSVEIEWELQKENSKRWNPEIQYTSNYYKSTNVDFAVNTDGTYSEPRPIGTRYLTRNL

SEQ ID NO: 4760 - protein, 738 aa, Adeno-associated virus
MAADGYLPDWLEDNLSEGIREWWDLKPGAPKPKANQQKQDDGRGLVLPGYKYLGPFNGLDKGEPVNAADAAALEHDKAYDQQLKAGDNPYLRYNHADAEFQERLQEDTSFGGNLGRAVFQAKKRVLEPLGLVEEAAKTAPGKKRPVEPSPQRSPDSSTGIGKKGQQPAKKRLNFGQTGDSESVPDPQPIGEPPAGPSGLGSGTMAAGGGAPMADNNEGADGVGSSSGNWHCDSTWLGDRVITTSTRTWALPTYNNHLYKQISNGTSGGSTNDNTYFGYSTPWGYFDFNRFHCHFSPRDWQRLINNNWGFRPKRLSFKLFNIQVKEVTQNEGTKTIANNLTSTIQVFTDSEYQLPYVLGSAHQGCLPPFPADVFMIPQYGYLTLNNGSQAVGRSSFYCLEYFPSQMLRTGNNFEFSYTFEDVPFHSSYAHSQSLDRLMNPLIDQYLYYLSRTQSTGGTQGTQQLLFSQAGPANMSAQAKNWLPGPCYRQQRVSTTLSQNNNSNFAWTGATKYHLNGRDSLVNPGVAMATHKDDEERFFPSSGVLMFGKQGAGRDNVDYSSVMLTSEEEIKTTNPVATEQYGVVADNLQQTNTGPIVGNVNSQGALPGMVWQNRDVYLQGPIWAKIPHTDGNFHPSPLMGGFGLKHPPPQILIKNTPVPADPPTTFSQAKLASFITQYSTGQVSVEIEWELQKENSKRWNPEIQYTSNYYKSTNVDFAVNTEGTYSEPRPIGTRYLTRNL

SEQ ID NO: 4761 - protein, 720 aa, Adeno-associated virus
MSFVDHPPDWLEEVGEGLREFLGLEAGPPKPKPNQQHQDQARGLVLPGYNYLGPGNGLDRGEPVNRADEVAREHDISYNEQLEAGDNPYLKYNHADAEFQEKLADDTSFGGNLGKAVFQAKKRVLEPFGLVEEGAKTAPTGKRIDDHFPKRKKARTEEDSKPSTSSDAEAGPSGSQQLQIPAQPASSLGADTMSAGGGGPLGDNNQGADGVGNASGDWHCDSTWMGDRVVTKSTRTWVLPSYNNHQYREIKSGSVDGSNANAYFGYSTPWGYFDFNRFHSHWSPRDWQRLINNYWGFRPRSLRVKIFNIQVKEVTVQDSTTTIANNLTSTVQVFTDDDYQLPYVVGNGTEGCLPAFPPQVFTLPQYGYATLNRDNTENPTERSSFFCLEYFPSKMLRTGNNFEFTYNFEEVPFHSSFAPSQNLFKLANPLVDQYLYRFVSTNNTGGVQFNKNLAGRYANTYKNWFPGPMGRTQGWNLGSGVNRASVSAFATTNRMELEGASYQVPPQPNGMTNNLQGSNTYALENTMIFNSQPANPGTTATYLEGNMLITSESETQPVNRVAYNVGGQMATNNQSSTTAPATGTYNLQEIVPGSVWMERDVYLQGPIWAKIPETGAHFHPSPAMGGFGLKHPPPMMLIKNTPVPGNITSFSDVPVSSFITQYSTGQVTVEMEWELKKENSKRWNPEIQYTNNYNDPQFVDFAPDSTGEYRTTRPIGTRYL

SEQ ID NO: 4762 - protein, 736 aa, Adeno-associated virus
MAADGYLPDWLEDNLSEGIREWWDLKPGAPKPKANQQKQDDGRGLVLPGYKYLGPFNGLDKGEPVNAADAAALEHDKAYDQQLKAGDNPYLRYNHADAEFQERLQEDTSFGGNLGRAVFQAKKRVLEPFGLVEEGAKTAPGKKRPVEQSPQEPDSSSGIGKTGQQPAKKRLNFGQTGDSESVPDPQPLGEPPATPAAVGPTTMASGGGAPMADNNEGADGVGNASGNWHCDSTWLGDRVITTSTRTWALPTYNNHLYKQISSASTGASNDNHYFGYSTPWGYFDFNRFHCHFSPRDWQRLINNNWGFRPKRLNFKLFNIQVKEVTTNDGVTTIANNLTSTVQVFSDSEYQLPYVLGSAHQGCLPPFPADVFMIPQYGYLTLNNGSQAVGRSSFYCLEYFPSQMLRTGNNFTFSYTFEDVPFHSSYAHSQSLDRLMNPLIDQYLYYLNRTQNQSGSAQNKDLLFSRGSPAGMSVQPKNWLPGPCYRQQRVSKTKTDNNNSNFTWTGASKYNLNGRESIINPGTAMASHKDDKDKFFPMSGVMIFGKESAGASNTALDNVMITDEEEIKATNPVATERFGTVAVNLQSSSTDPATGDVHVMGALPGMVWQDRDVYLQGPIWAKIPHTDGHFHPSPLMGGFGLKHPPPQILIKNTPVPANPPAEFSATKFASFITQYSTGQVSVEIEWELQKENSKRWNPEVQYTSNYAKSANVDFTVDNNGLYTEPRPIGTRYLTRPL

SEQ ID NO: 4763 - protein, 736 aa, Adeno-associated virus
MAADGYLPDWLEDNLSEGIREWWDLKPGAPKPKANQQKQDDGRGLVLPGYKYLGPFNGLDKGEPVNAADAAALEHDKAYDQQLKAGDNPYLRYNHADAEFQERLQEDTSFGGNLGRAVFQAKKRVLEPFGLVEEGAKTAPGKKRPVEQSPQEPDSSSGIGKTGQQPAKKRLNFGQTGDSESVPDPQPLGEPPATPAAVGPTTMASGGGAPMADNNEGADGVGNASGNWHCDSTWLGDRVITTSTRTWALPTYNNHLYKQISSASTGASNDNHYFGYSTPWGYFDFNRFHCHFSPRDWQRLINNNWGFRPKRLNFKLFNIQVKEVTTNDGVTTIANNLTSTVQVFSDSEYQLPYVLGSAHQGCLPPFPADVFMIPQYGYLTLNNGSQAVGRSSFYCLEYFPSQMLRTGNNFTFSYTFEDVPFHSSYAHSQSLDRLMNPLIDQYLYYLNRTQNQSGSAQNKDLLFSRGSPAGMSVQPKNWLPGPCYRQQRVSKTKTDNNNSNFTWTGASKYNLNGRESIINPGTAMASHKDDEDKFFPMSGVMIFGKESAGASNTALDNVMITDEEEIKATNPVATERFGTVAVNLQSSSTDPATGDVHVMGALPGMVWQDRDVYLQGPIWAKIPHTDGHFHPSPLMGGFGLKHPPPQILIKNTPVPANPPAEFSATKFASFITQYSTGQVSVEIEWELQKENSKRWNPEVQYTSNYAKSANVDFTVDNNGLYTEPRPIGTRYLTRPL

SEQ ID NO: 4764 - protein, 736 aa, Adeno-associated virus
MAADGYLPDWLEDNLSEGIREWWDLKPGAPKPKANQQKQDDGRGLVLPGYKYLGPFNGLDKGEPVNAADAAALEHDKAYDQQLKAGDNPYLRYNHADAEFQERLQEDTSFGGNLGRAVFQAKKRVLEPLGLVEEGAKTAPGKKRPVEQSPQEPDSSSGIGKTGQQPAKKRLNFGQTGDSESVPDPQPLGEPPATPAAVGPTTMASGGGAPMADNNEGADGVGNASGNWHCDSTWLGDRVITTSTRTWALPTYNNHLYKQISSASTGASNDNHYFGYSTPWGYFDFNRFHCHFSPRDWQRLINNNWGFRPKRLNFKLFNIQVKEVTTNDGVTTIANNLTSTVQVFSDSEYQLPYVLGSAHQGCLPPFPADVFMIPQYGYLTLNNGSQAVGRSSFYCLEYFPSQMLRTGNNFTFSYTFEDVPFHSSYAHSQSLDRLMNPLIDQYLYYLNRTQNQSGSAQNKDLLFSRGSPAGMSVQPKNWLPGPCYRQQRVSKTKTDNNNSNFTWTGASKYNLNGRESIINPGTAMASHKDDEDKFFPMSGVMIFGKESAGASNTALDNVMITDEEEIKATNPVATERFGTVAVNLQSSSTDPATGDVHVMGALPGMVWQDRDVYLQGPIWAKIPHTDGHFHPSPLMGGFGLKHPPPQILIKNTPVPANPPAEFSATKFASFITQYSTGQVSVEIEWELQKENSKRWNPEVQYTSNYAKSANVDFTVDNNGLYTEPRPIGTRYLTRPL

SEQ ID NO: 4765 - protein, 736 aa, Adeno-associated virus
MAADGYLPDWLEDNLSEGIREWWDLKPGAPKPKANQQKQDDGRGLVLPGYKYLGPFNGLDKGEPVNAADAAALEHDKAYDQQLKAGDNPYLRYNHADAEFQERLQEDTSFGGNLGRAVFQAKKRVLEPLGLVEEGAKTAPGKKRPVEQSPQEPDSSSGIGKTGQQPAKKRLNFGQTGDSESVPDPQPLGEPPATPAAVGPTTMASGGGAPMADNNEGADGVGNASGNWHCDSTWLGDRVITTSTRTWALPTYNNHLYKQISSASTGASNDNHYFGYSTPWGYFDFNRFHCHFSPRDWQRLINNNWGFRPKRLNFKLFNIQVKEVTTNDGVTTIANNLTSTVQVFSDSEYQLPYVLGSAHQGCLPPFPADVFMIPQYGYLTLNNGSQAVGRSSFYCLEYFPSQMLRTGNNFTFSYTFEDVPFHSSYAHSQSLDRLMNPLIDQYLYYLNRTQNQSGSAQNKDLLFSRGSPAGMSVQPKNWLPGPCYRQQRVSKTKTDNNNSNFTWTGASKYNLNGRESIINPGTAMASHKDDKDKFFPMSGVMIFGKESAGASNTALDNVMITDEEEIKATNPVATERFGTVAVNLQSSSTDPATGDVHVMGALPGMVWQDRDVYLQGPIWAKIPHTDGHFHPSPLMGGFGLKHPPPQILIKNTPVPANPPAEFSATKFASFITQYSTGQVSVEIEWELQKENSKRWNPEVQYTSNYAKSANVDFTVDNNGLYTEPRPIGTRYLTRPL

SEQ ID NO: 4766 - protein, 728 aa, Adeno-associated virus
MAADGYLPDWLEGNLSEGIREWWDLKPGAPKPKANQQKQDDGRGLVLPGYRYLGPFNGLDKGEPVNEADAAALEHDKAYDKQLEQGDNPYLKYNHADAEFQERLQEDTSFGGNLGRAVFQAKKRVLEPLGLVEEGAKTAPGKKRPIESPDSSTGIGKNGQPPAKKKLNFGQTGDSESVPDPQPLGEPPAAPSGLGSGTMAAGGGAPMADNNEGADGVGNASGNWHCDSTWLGDRVITTSTRTWALPTYNNHLYKQISSQSGATNDNHFFGYSTPWGYFDFNRFHCHFSPRDWQRLINNNWGFRPRKLRFKLFNIQVKEVTTNDGVTTIANNLTSTIQVFSDSEYQLPYVLGSAHQGCLPPFPADVFMIPQYGYLTLNNGSQSVGRSSFYCLEYFPSQMLRTGDNFEFSYTFEEVPFHSSYAHSQSLDRLMNPLIDQYLYYLARTQSTTGSTRELQFHQAGPNTMAEQSKNWLPGPCYRQQRLSKNIDSNNNSNFAWTGATKYHLNGRNSLTNPGVAMATNKDDEDQFFPINGVLVFGKTGAANKTTLENVLMTSEEEIKTTNPVATEEYGVVSSNLQSSTAGPQTQTVNSQGALPGMVWQNRDVYLQGPIWAKIPHTDGNFHPSPLMGGFGLKHPPPQILIKNTPVPANPPEVFTPAKFASFITQYSTGQVSVEIEWELQKENSKRWNPEIQYTSNYAKSNNVEFAVNNEGVYTEPRPIGTRYLTRNL

SEQ ID NO: 4767 - DNA, 2211 bp, Adeno-associated virus
atggctgccgatggttatcttccagattggctcgaggacaaccttagtgaaggaattcgcgagtggtgggctttgaaacctggagcccctcaacccaaggcaaatcaacaacatcaagacaacgctcgaggtcttgtgcttccgggttacaaataccttggacccggcaacggactcgacaagggggagccggtcaacgcagcagacgcggcggccctcgagcacgacaaggcctacgaccagcagctcaaggccggagacaacccgtacctcaagtacaaccacgccgacgccgagttccaggagcggctcaaagaagatacgtcttttgggggcaacctcgggcgagcagtcttccaggccaaaaagaggcttcttgaacctcttggtctggttgaggaagcggctaagacggctcctggaaagaagaggcctgtagagcagtctcctcaggaaccggactcctccgcgggtattggcaaatcgggtgcacagcccgctaaaaagagactcaatttcggtcagactggcgacacagagtcagtcccagaccctcaaccaatcggagaacctcccgcagccccctcaggtgtgggatctcttacaatggcttcaggtggtggcgcaccagtggcagacaataacgaaggtgccgatggagtgggtagttcctcgggaaattggcattgcgattcccaatggctgggggacagagtcatcaccaccagcacccgaacctgggccctgcccacctacaacaatcacctctacaagcaaatctccaacagcacatctggaggatcttcaaatgacaacgcctacttcggctacagcaccccctgggggtattttgacttcaacagattccactgccacttctcaccacgtgactggcagcgactcatcaacaacaactggggattccggcctaagcgactcaacttcaagctcttcaacattcaggtcaaagaggttacggacaacaatggagtcaagaccatcgccaataaccttaccagcacggtccaggtcttcacggactcagactatcagctcccgtacgtgctcgggtcggctcacgagggctgcctcccgccgttcccagcggacgttttcatgattcctcagtacgggtatctgacgcttaatgatggaagccaggccgtgggtcgttcgtccttttactgcctggaatatttcccgtcgcaaatgctaagaacgggtaacaacttccagttcagctacgagtttgagaacgtacctttccatagcagctacgctcacagccaaagcctggaccgactaatgaatccactcatcgaccaatacttgtactatctctcaaagactattaacggttctggacagaatcaacaaacgctaaaattcagtgtggccggacccagcaacatggctgtccagggaagaaactacatacctggacccagctaccgacaacaacgtgtctcaaccactgtgactcaaaacaacaacagcgaatttgcttggcctggagcttcttcttgggctctcaatggacgtaatagcttgatgaatcctggacctgctatggccagccacaaagaaggagaggaccgtttctttcctttgtctggatctttaatttttggcaaacaaggaactggaagagacaacgtggatgcggacaaagtcatgataaccaacgaagaagaaattaaaactactaacccggtagcaacggagtcctatggacaagtggccacaaaccaccagagtgcccaagcacaggcgcagaccggctgggttcaaaaccaaggaatacttccgggtatggtttggcaggacagagatgtgtacctgcaaggacccatttgggccaaaattcctcacacggacggcaactttcacccttctccgctgatgggagggtttggaatgaagcacccgcctcctcagatcctcatcaaaaacacacctgtacctgcggatcctccaacggccttcaacaaggacaagctgaactctttcatcacccagtattctactggccaagtcagcgtggagatcgagtgggagctgcagaaggaaaacagcaagcgctggaacccggagatccagtacacttccaactattacaagtctaataatgttgaatttgctgttaatactgaaggtgtatatagtgaaccccgccccattggcaccagatacctgactcgtaatctgtaa

SEQ ID NO: 4768 - protein, 736 aa, Adeno-associated virus
MAADGYLPDWLEDNLSEGIREWWALKPGAPQPKANQQHQDNARGLVLPGYKYLGPGNGLDKGEPVNAADAAALEHDKAYDQQLKAGDNPYLKYNHADAEFQERLKEDTSFGGNLGRAVFQAKKRLLEPLGLVEEAAKTAPGKKRPVEQSPQEPDSSAGIGKSGAQPAKKRLNFGQTGDTESVPDPQPIGEPPAAPSGVGSLTMASGGGAPVADNNEGADGVGSSSGNWHCDSQWLGDRVITTSTRTWALPTYNNHLYKQISNSTSGGSSNDNAYFGYSTPWGYFDFNRFHCHFSPRDWQRLINNNWGFRPKRLNFKLFNIQVKEVTDNNGVKTIANNLTSTVQVFTDSDYQLPYVLGSAHEGCLPPFPADVFMIPQYGYLTLNDGSQAVGRSSFYCLEYFPSQMLRTGNNFQFSYEFENVPFHSSYAHSQSLDRLMNPLIDQYLYYLSKTINGSGQNQQTLKFSVAGPSNMAVQGRNYIPGPSYRQQRVSTTVTQNNNSEFAWPGASSWALNGRNSLMNPGPAMASHKEGEDRFFPLSGSLIFGKQGTGRDNVDADKVMITNEEEIKTTNPVATESYGQVATNHQSAQAQAQTGWVQNQGILPGMVWQDRDVYLQGPIWAKIPHTDGNFHPSPLMGGFGMKHPPPQILIKNTPVPADPPTAFNKDKLNSFITQYSTGQVSVEIEWELQKENSKRWNPEIQYTSNYYKSNNVEFAVNTEGVYSEPRPIGTRYLTRNL

SEQ ID NO: 4769 - DNA, 2460 bp, Adeno-associated virus
ggtaattcctccggaaattggcattgcgattccacatggctgggcgaccgagtcattaccaccagcacccggacttgggccctgcccacctacaacaaccacctctacaagcaaatctccagccaatcgggtgccaccaacgacaaccactacttcggctacagcaccccttgggggtattttgatttcaacagattccactgccatttctcaccacgtgactggcagcgactcatcaacaacaactggggattcatggctgccgatggttatcttccagattggctcgaggacactctctctgaaggaatcagacagtggtggaagctcaaacctggcccaccaccgccgaaacctaaccaacaacaccgggacgacagtaggggtcttgtgcttcctgggtacaagtacctcggacccttcaacggactcgacaaaggagagccggtcaacgaggcagacgccgcggccctcgagcacgacaaagcctacgaccaccagctcaagcaaggggacaacccgtacctcaaatacaaccacgcggacgctgaatttcaggagcgtcttcaagaagatacgtctttcgggggcaacctcgggcgagcagtcttccaggccaaaaagagggtactcgagcctcttggtctggttgaggaagctgttaagacggctcctggaaaaaagagacctatagagcagtctcctgcagaaccggactcttcctcgggcatcggcaaatcaggccagcagcccgctaagaaaagactcaattttggtcagactggcgacacagagtcagtcccagaccctcaaccaatcggagaaccccccgcagccccctctggtgtgggatctaatacaatggcttcaggcggtggggcaccaatggcagacaataacgaaggcgccgacggagtgggtaattcctcgggaaattggcattgcgattccacatggatgggcgacagagttatcaccaccagcacaagaacctgggccctccccacctacaataatcacctctacaagcaaatctccagcgaatcgggagccaccaacgacaaccactacttcggctacagcaccccctgggggtattttgactttaacagattccactgtcacttctcaccacgtgactggcagcgactcatcaacaacaactggggatttagacccaagaaactcaatttcaagctcttcaacatccaagtcaaggaggtcacgcagaatgatggaaccacgaccatcgccaataaccttaccagcacggtgcaggtcttcacagactctgagtaccagctgccctacgtcctcggttcggctcaccagggctgccttccgccgttcccagcagacgtcttcatgattcctcagtacggctacttgactctgaacaatggcagccaagcggtaggacgttcttcattctactgtctagagtattttccctctcagatgctgaggacgggaaacaacttcaccttcagctacacttttgaagacgtgcctttccacagcagctacgcgcacagccagagtctggatcggctgatgaatcctctcattgaccagtacctgtattacctgagcaaaactcagggtacaagtggaacaacgcagcaatcgagactgcagttcagccaagctgggcctagctccatggctcagcaggccaaaaactggctaccgggacccagctaccgacagcagcgaatgtctaagacggctaatgacaacaacaacagtgaatttgcttggactgcagccaccaaatattacctgaatggaagaaattctctggtcaatcccgggcccccaatggccagtcacaaggacgatgaggaaaagtatttccccatgcacggaaatctcatctttggaaaacaaggcacaggaactaccaatgtggacattgaatcagtgcttattacagacgaagaagaaatcagaacaactaatcctgtggctacagaacaatacggacaggttgccaccaaccatcagagtcagaacaccacagcttcctatggaagtgtggacagccagggaatcttacctggaatggtgtggcaggaccgcgatgtctatcttcaaggtcccatttgggccaaaactcctcacacggacggacactttcatccttctccgctcatgggaggctttggactgaaacaccctcctccccagatcctgatcaaaaacacacctgtgccagcgaatcccgcgaccactttcactcctggaaagtttgcttcgttcattacccagtattccaccggacaggtcagcgtggaaatagagtgggagctgcagaaagaaaacagcaaacgctggaacccagaaattcagtacacctccaactacaacaagtcggtgaatgtggagtttaccgtggacgcaaacggtgtttattctgaaccccgccctattggcactcgttaccttacccggaacttg

SEQ ID NO: 4770 - DNA, 3123 bp, Adeno-associated virus
gaattcgccctttctacggctgcgtcaactggaccaatgaaaactttcccttcaacgattgcgtcgacaagatggtgatctggtgggaggagggaaagatgaccgccaaggtcgtggaatctgccaaagccattctgggtggaggcaaggttcgtgtggaccagaaatgcaagtcttcggcccagatcgacccgactccggtgattgtcacctctaacaccaacatgtgcgccgtgattgacggaaactcgaccaccttcgagcaccagcagccgttgcaagaccggatgttcaaatttgaacttacccgccgtttggatcatgactttgggaaggtcaccaagcaggaagtcaaagactttttccggtgggctcaagatcacgtgactgaggtggagcatgagttctacgtcaaaaagggtggagccaagaaaaggcccgcccccgatgatgtatatataaatgagcccaagcgggcgcgcgagtcagttgcgcagccatcgacgtcagacgcggaagcttcgataaactacgcggacaggtaccaaaacaaatgttctcgtcacgtgggcatgaatctgatgctgtttccctgtcgacaatgcgaaagaatgaatcagaattcaaatatctgcttcacacacgggcaaaaagactgtttggaatgctttcccgtgtcagaatctcaacccgtttctgtcgtcagaaaaacgtatcagaaactttgttacattcatcatatcatgggaaaagtaccagacgcctgcactgcctgcgacctggtaaatgtggacttggatgactgtatttctgagcaataaatgacttaaatcaggtatggctgctgacggttatcttccagattggctcgaggacactctctctgaaggaatcagacagtggtggaagctcaaacctggcccaccaccgccgaaacctaaccaacaacaccgggacgacagtaggggtcttgtgcttcctgggtacaagtacctcggacccttcaacggactcgacaaaggagagccggtcaacgaggcagacgccgcggccctcgagcacgacaaagcctacgaccaccagctcaagcaaggggacaacccgtacctcaaatacaaccacgcggacgctgaatttcaggagcgtcttcaagaagatacgtctttcgggggcaacctcgggcgagcagtcttccaggccaaaaagagggtactcgagcctcttggtctggttgaggaagctgttaagacggctcctggaaaaaagagacctatagagcagtctcctgcagaaccggactcttcctcgggcatcggcaaatcaggccagcagcccgctaagaaaagactcaattttggtcagactggcgacacagagtcagtcccaggccctcaaccaatcggagaaccccccgcagccccctctggtgtgggatctaatacaatggcttcaggcggtggggcaccaatggcagacaataacgaaggcgccgacggagtgggtaattcctcgggaaattggcattgcgattccacatggatgggcgacagagttatcaccaccagcacaagaacctgggccctccccacctacaataatcacctctacaagcaaatctccagcgaatcgggagccaccaacgacaaccactacttcggctacagcaccccctgggggtattttgactttaacagattccactgtcacttctcaccacgtgactggcagcgactcatcaacaacaactggggatttagacccaagaaactcaatttcaagctcttcaacatccaagtcaaggaggtcacgcagaatgatggaaccacgaccatcgccaataaccttaccagcgcggtgcaggtcttcacagactctgagtaccagctgccctacgtcctcggttcggctcaccagggctgccttccgccgttcccagcagacgtcttcatgattcctcagtacggctacttgactctgaacaatggcagccaagcggtaggacgttcttcattctactgtctagagtattttccctctcagatgctgaggacgggaaacaacttcaccttcagctacacttttgaagacgtgcctttccacagcagctacgcgcacagccagagtctggatcggctgatgaatcctctcattgaccagtacctgtattacctgagcaaaactcagggtacaagtggaacaacgcagcaatcgagactgcagttcagccaagctgggcctagctccatggctcagcaggccaaaaactggctaccgggacccagctaccgacagcagcgaatgtctaagacggctaatgacaacaacaacagtgaatttgcttggactgcagccaccaaatattacctgaatggaagaaattctctggtcaatcccgggcccccagtggccagtcacaaggacgatgaggaaaagtatttccccatgcacggaaatctcatctttggaaaacaaggcacaggaactaccaatgtggacattgaatcagtgcttattacagacgaagaagaaatcagaacaactaatcctgtggctacagaacaatacggacaggttgccaccaaccatcagagtcagaacaccacagcttcctatggaagtgtggacagccagggaatcttacctggaatggtgtggcaggaccgcgatgtctatcttcaaggtcccatttgggccaaaactcctcacacggacggacactttcatccttctccgctcatgggaggctttggactgaaacaccctcctccccagatcctgatcaaaaacacacctgtgccagcgaatcccgcgaccactttcactcctggaaagtttgcttcgttcattacccagtattccacctgacaggtcagcgtggaaatagagtgggagctgcagaaagaaaacagcaaacgctggaacccagaaattcagtacacctccaactacaacaagtcggtgaatgtggagtttaccgtggacgcaaacggtgtttattctgaaccccgccctattggcactcgttaccttacccggaacttgtaatttcctgttaatgaataagccgatttatgcgtttcagttgaactttggtctctgcgaagggcgaattcgtttaaacct

SEQ ID NO: 4771 - protein, 735 aa, Adeno-associated virus
MAADGYLPDWLEDTLSEGIRQWWKLKPGPPPPKPNQQHRDDSRGLVLPGYKYLGPFNGLDKGEPVNEADAAALEHDKAYDHQLKQGDNPYLKYNHADAEFQERLQEDTSFGGNLGRAVFQAKKRVLEPLGLVEEAVKTAPGKKRPIEQSPAEPDSSSGIGKSGQQPAKKRLNFGQTGDTESVPGPQPIGEPPAAPSGVGSNTMASGGGAPMADNNEGADGVGNSSGNWHCDSTWMGDRVITTSTRTWALPTYNNHLYKQISSESGATNDNHYFGYSTPWGYFDFNRFHCHFSPRDWQRLINNNWGFRPKKLNFKLFNIQVKEVTQNDGTTTIANNLTSAVQVFTDSEYQLPYVLGSAHQGCLPPFPADVFMIPQYGYLTLNNGSQAVGRSSFYCLEYFPSQMLRTGNNFTFSYTFEDVPFHSSYAHSQSLDRLMNPLIDQYLYYLSKTQGTSGTTQQSRLQFSQAGPSSMAQQAKNWLPGPSYRQQRMSKTANDNNNSEFAWTAATKYYLNGRNSLVNPGPPVASHKDDEEKYFPMHGNLIFGKQGTGTTNVDIESVLITDEEEIRTTNPVATEQYGQVATNHQSQNTTASYGSVDSQGILPGMVWQDRDVYLQGPIWAKTPHTDGHFHPSPLMGGFGLKHPPPQILIKNTPVPANPATTFTPGKFASFITQYSTGQVSVEIEWELQKENSKRWNPEIQYTSNYNKSVNVEFTVDANGVYSEPRPIGTRYLTRNL

SEQ ID NO: 4772 - DNA, 3123 bp, Adeno-associated virus
gaattcgccctttctacggctgcgtcaactggaccaatgaaaactttcccttcaacgattgcgtcgacaagatggtgatctggtgggaggagggaaagatgaccgccaaggtcgtggaatctgccaaagccattctgggtggaagcaaggttcgtgtggaccagaaatgcaagtcttcggcccagatcgacccgactccggtgattgtcacctctaacaccaacatgtgcgccgtgattgacggaaactcgaccaccttcgagcaccagcagccgttgcaagaccggatgttcaaatttgaacttacccgccgtttggatcatgactttgggaaggtcaccaagcaggaagtcaaagactttttccggtgggctcaagatcacgtgactgaggtggagcatgagttctacgtcaaaaagggtggagccaagaaaaggcccgcccccgatgatgtatatataaatgagcccaagcgggcgcgcgagtcagttgcgcagccatcgacgtcagacgcggaagcttcgataaactacgcgggcaggtaccaaaacaaatgttctcgtcacgtgggcatgaatctgatgctgtttccctgtcgacaatgcgaaagaatgaatcagaattcaaatatctgcttcacacacgggcaaaaagactgtttggaatgctttcccgtgtcagaatctcaacccgtttctgtcgtcagaaaaacgtatcagaaactttgttacattcatcatatcatgggaaaagaaccagacgcctgcactgcctgcgacctggtaaatgtggacttggatgactgtatttctgagcaataaatgacttaaatcaggtatggctgctgacggttatcttccagattggctcgaggacactctctctgaaggaatcagacagtggtggaagctcaaacctggcccaccaccgccgaaacctaaccaacaacaccgggacgacagtaggggtcttgtgcttcctgggtacaagtacctcggacccttcaacggactcgacaaaggagagccggtcaacgaggcagacgccgcggccctcgagcacgacaaagcctacgaccaccagctcaagcaaggggacaacccgtacctcaaatacaaccacgcggacgctgaatttcaggagcgtcttcaagaagatacgtctttcgggggcaacctcgggcgagcagtcttccaggccaaaaagagggtactcgagcctcttggtctggttgaggaagctgttaagacggctcctggaaaaaagagacctatagagcagtctcctgcagaaccggactcttcctcgggcatcggcgaatcaggccagcagcccgctaagaaaagactcaattttggtcagactggcgacacagagtcagtcccagaccctcaaccaatcggagaaccccccgcagccccctctggtgtgggatctaatacaatggcttcaggcggtggggcaccaatggcagacgataacgaaggcgccgacggagtgggtaattcctcgggaaattggcattgcgattccacatggatgggcgacagagttatcaccaccagcacaagaacctgggccctccccacctacaataatcacctctacaagcaaatctccagcgaatcgggagccaccaacgacaaccactacttcggctacagcaccccctgggggtattttgactttaacagattccactgtcacttctcaccacgtgactggcagcgactcatcaacaacaactggggatttagacccaagaaactcaatttcaagctcttcaacatccaagtcaaggaggtcacgcagaatgatggaaccacgaccatcgccaataaccttaccagcacggtgcaggtcttcacagactctgagtaccagctgccctacgtcctcggttcggctcaccagggctgccttccgccgttcccagcagacgtcttcatgattcctcagtacggctacttgactctgaacaatggcagccaagcggtaggacgttcttcattctactgtctagagtattttccctctcagatgctgaggacgggaaacaacttcaccttcagctacacttttgaagacgtgcctttccacagcagctacgcgcacagccagagtctggatcggctgatgaatcctctcattgaccagtacctgtattacctgagcaaaactcagggtacaagtggaacaacgcagcaatcgagactgcagttcagccaagctgggcctagctccatggctcagcaggccaaaaactggctaccgggacccagctaccgacagcagcgaatgtctaagacggctaatgacaacaacaacagtgaatttgcttggactgcagccaccaaatattacctgaatggaagaaattctctggtcaatcccgggcccccaatggccagtcacaaggacgatgaggaaaagtatttccccatgcacggaaatctcatctttggaaaacaaggcacaggaactaccaatgtggacattgaatcagtgcttattacagacgaagaagaaatcagaacaactaatcctgtggctacagaacaatacggacaggttgccaccaaccatcagagtcaggacaccacagcttcctatggaagtgtggacagccagggaatcttacctggaatggtgtggcaggaccgcgatgtctatcttcaaggtcccatttgggccaaaactcctcacacggacggacactttcatccttctccgctcatgggaggctttggactgaaacaccctcctccccagatcctgatcaaaaacacacctgtgccagcgaatcccgcgaccactttcactcctggaaagtttgcttcgttcattacccagtattccaccggacaggtcagcgtggaaatagagtgggagctgcagaaagaaaacagcaaacgctggaacccagaaattcagtacacctccaactacaacaagtcggtgaatgtggagtttaccgtggacgcaaacggtgtttattctgaaccccgccctattggcactcgttaccttacccggaacttgtaatttcctgttaatgaataaaccgatttatgcgtttcagttgaactttggtctctgcgaagggcgaattcgcggccgcta

SEQ ID NO: 4773 - protein, 735 aa, Adeno-associated virus
MAADGYLPDWLEDTLSEGIRQWWKLKPGPPPPKPNQQHRDDSRGLVLPGYKYLGPFNGLDKGEPVNEADAAALEHDKAYDHQLKQGDNPYLKYNHADAEFQERLQEDTSFGGNLGRAVFQAKKRVLEPLGLVEEAVKTAPGKKRPIEQSPAEPDSSSGIGESGQQPAKKRLNFGQTGDTESVPDPQPIGEPPAAPSGVGSNTMASGGGAPMADDNEGADGVGNSSGNWHCDSTWMGDRVITTSTRTWALPTYNNHLYKQISSESGATNDNHYFGYSTPWGYFDFNRFHCHFSPRDWQRLINNNWGFRPKKLNFKLFNIQVKEVTQNDGTTTIANNLTSTVQVFTDSEYQLPYVLGSAHQGCLPPFPADVFMIPQYGYLTLNNGSQAVGRSSFYCLEYFPSQMLRTGNNFTFSYTFEDVPFHSSYAHSQSLDRLMNPLIDQYLYYLSKTQGTSGTTQQSRLQFSQAGPSSMAQQAKNWLPGPSYRQQRMSKTANDNNNSEFAWTAATKYYLNGRNSLVNPGPPMASHKDDEEKYFPMHGNLIFGKQGTGTTNVDIESVLITDEEEIRTTNPVATEQYGQVATNHQSQDTTASYGSVDSQGILPGMVWQDRDVYLQGPIWAKTPHTDGHFHPSPLMGGFGLKHPPPQILIKNTPVPANPATTFTPGKFASFITQYSTGQVSVEIEWELQKENSKRWNPEIQYTSNYNKSVNVEFTVDANGVYSEPRPIGTRYLTRNL

SEQ ID NO: 4774 - DNA, 3113 bp, Adeno-associated virus
gaattcgccctttctacggctgcgtcaactggaccaatgaaaactttcccttcaacgattgcgtcgacaagatggtgatctggtgggaggagggaaagatgaccgccaaggtcgtggaatctgccaaagccattctgggtggaagcaaggttcgtgtggaccagaaatgcaagtcttcggcccagatcgacccgactccggtgattgtcacctctaacaccaacatgtgcgccgtgattgacggaaactcgaccaccttcgagcaccagcagccgttgcaagaccggatgttcaaatttgaacttacccgccgtttggatcatgactttgggaaggtcaccaagcaggaagtcaaagactttttccggtgggctcaagatcacgtgactgaggtggagcatgagttctacgtcaaaaagggtggagccaagaaaaggcccgcccccgatgatgtatatataaatgagcccaagcgggcgcgcgagtcagttgcgcagccatcgacgtcagacgcggaagcttcgataaactacgcggacaggtaccaaaacaaatgttctcgtcacgtgggcatgaatctgatgctgtttccctgtcgacaatgcgaaagaatgaatcagaattcaaatatctgcttcacacacgggcaaaaagactgtttggaatgctttcccgtgtcagaatctcaacccgttcctgtcgtcagaaaaacgtatcagaaactttgttacattcatcatatcatgggaaaagtaccagacgcctgcactgcctgcgacctggtaaatgtggacttggatgactgtatttctgagcaataaatgacttaaatcaggtatggctgctgacggttatcttccagattggctcgaggacactctctctgaaggaatcagacagtggtggaagctcaaacctggcccaccaccgccgaaacctaaccaacaacaccgggacgacagtaggggtcttgtgcttcctgggtacaagtacctcggacccttcaacggactcgacaaaggagagccggtcaacgaggcagacgccgcggccctcgagcacgacaaagcctacgaccaccagctcaagcaaggggacaacccgtacctcaaatacaaccacgcggacgctgaatttcaggagcgtcttcaagaagatacgtctttcgggggcaacctcgggcgagcagtcttccaggccaaaaagagggtactcgagcctcttggtctggttgaggaagctgttaagacggctcctggaaaaaagagacctatagagcagtctcctgcagaaccggactcttcctcgggcatcggcaaatcaggccagcagcccgctaagaaaagactcaattttggtcagactggcgacacagagtcagtcccagaccctcaaccaatcggagaaccccccgcagccccctctggtgtgggatctaatacaatggcttcaggcggtggggcaccaatggcagacaataacgaaggcgccgacggagtgggtaattcctcgggaaattggcattgcgattccacatggatgggcgacagagttatcaccaccagcacaagaacctgggccctccccacctacaataatcacctctacaagcaaatctccagcgaatcgggagccaccaacgacaaccactacttcggctacagcaccccctgggggtattttgactttaacagattccactgtcacttctcaccacgtgactggcagcgactcatcaataacaactggggatttagacccaagaaactcaatttcaagctcttcaacatccaagtcaaggaggtcacgcagaatgatggaaccacgaccatcgccaataaccttaccagcacggtgcaggtcttcacagactctgagtaccagctgccctacgtcctcggttcggctcaccagggctgccttccgccgttcccagcagacgtcttcatgattcctcagtacggctacttgactctgaacaatggcagccaagcggtaggacgttcttcattctactgtctagagtattttccctctcagatgctgaggacgggaaacaacttcaccttcagctacacttttgaagacgtgcctttccacagcagctacgcgcacagccagagtctggatcggctgatgaatcctctcattgaccagtacctgtattacctgagcaaaactcagggtacaagtggaacaacgcagcaatcgagactgcagttcaaccaagctgggcctagctccatggctcagcaggccaaaaactggctaccgggacccagctaccgacagcagcgaatgtctaagacggctaatgacaacaacaacagtgaatttgcttggactgcagccaccaaatattacccgaatggaagaaattctctggtcaatcccgggcccccaatggccagtcacaaggacgatgaggaaaagtatttccccatgcacggaaatctcatctttggaaaacaaggcacaggaactaccaatgtggacattgaatcagtgcttattacagacgaagaagaaatcagaacgactaatcctgtggctacagaacaatacggacaggttgccaccaaccgtcagagtcagaacaccacagcttcctatggaagtgtggacagccagggaatcttacctggaatggtgtggcaggaccgcgatgtctatcttcaaggtcccatttgggccaaaactcctcacacggacggacactttcatccttctccgctcatgggaggctttggactgaaacaccctcctccccagatcctgatcaaaaacacacctgtgccagcgaatcccgcgaccactttcactcctggaaagtttgcttcgttcattacccagtattccaccggacaggtcagcgtggaaatagagtgggagctgcagaaagaaaacagcaaacgctggaacccggaaattcagtacacctccaactacaacaagtcggtgaatgtggagtttaccgtggacgcaaacggtgtttattctgaaccccgccctattggcactcgttaccttacccggaacttgtaatttcctgttaatgaataaaccgatttatgcgtttcagttgaactttggtctctgcgaagggcgaattc

SEQ ID NO: 4775 - protein, 735 aa, Adeno-associated virus
MAADGYLPDWLEDTLSEGIRQWWKLKPGPPPPKPNQQHRDDSRGLVLPGYKYLGPFNGLDKGEPVNEADAAALEHDKAYDHQLKQGDNPYLKYNHADAEFQERLQEDTSFGGNLGRAVFQAKKRVLEPLGLVEEAVKTAPGKKRPIEQSPAEPDSSSGIGKSGQQPAKKRLNFGQTGDTESVPDPQPIGEPPAAPSGVGSNTMASGGGAPMADNNEGADGVGNSSGNWHCDSTWMGDRVITTSTRTWALPTYNNHLYKQISSESGATNDNHYFGYSTPWGYFDFNRFHCHFSPRDWQRLINNNWGFRPKKLNFKLFNIQVKEVTQNDGTTTIANNLTSTVQVFTDSEYQLPYVLGSAHQGCLPPFPADVFMIPQYGYLTLNNGSQAVGRSSFYCLEYFPSQMLRTGNNFTFSYTFEDVPFHSSYAHSQSLDRLMNPLIDQYLYYLSKTQGTSGTTQQSRLQFNQAGPSSMAQQAKNWLPGPSYRQQRMSKTANDNNNSEFAWTAATKYYPNGRNSLVNPGPPMASHKDDEEKYFPMHGNLIFGKQGTGTTNVDIESVLITDEEEIRTTNPVATEQYGQVATNRQSQNTTASYGSVDSQGILPGMVWQDRDVYLQGPIWAKTPHTDGHFHPSPLMGGFGLKHPPPQILIKNTPVPANPATTFTPGKFASFITQYSTGQVSVEIEWELQKENSKRWNPEIQYTSNYNKSVNVEFTVDANGVYSEPRPIGTRYLTRNL

SEQ ID NO: 4776 - DNA, 3122 bp, Adeno-associated virus
agcggccgcgaattcgccctttctacggctgcgtcaactggaccaatgaaaactttcccttcaacgattgcgtcgacaagatggtgatctggtgggaggagggaaagatgaccgccaaggtcgtggaatctgccaaagccattctgggtggaagcaaggttcgtgtggaccagaaatgcaggtcttcggcccagatcgacccgactccggtgattgtcacctctaacaccaacatgtgcgccgtgattgacggaaactcgaccaccttcgagcaccagcagccgttgcaagaccggatgttcaaatttgaacttacccgccgtttggatcatgactttgggaaggtcaccaagcaggaagtcaaagactttttccggtgggctcaagatcacgtgactgaggtggagcatgagttctacgtcaaaaagggtggagccaagaaaaggcccgcccccgatgatgtatatataaatgagcccaagcgggcgcgcgagtcagttgcgcagccatcgacgtcagacgcggaagcttcgataaactacgcggacaggtaccaaaacaaatgttctcgtcacgtgggcatgaatctgatgctgtttccctgtcgacaatgcgaaagaatgaatcagaattcaaatatctgcttcacacacgggcaaaaagactgtttggaatgctttcccgtgtcagaatctcaacccgtttctgtcgtcagaaaaacgtatcagaaactttgttacattcatcatatcatgggaaaagtaccagacgcctgcactgcctgcgacctggtaaatgtggacttggatgactgtatttctgagcaataaatgacttaaatcaggtatggctgctgacggttatcttccagattggctcgaggacactctctctgaaggaatcagacagtggtggaagctcaaacctggcccaccaccgccgaaacctaaccaacaacaccgggacgacagtaggggtcttgtgcttcctgggtacaagtacctcggacccttcaacggactcgacaaaggagagccggtcaacgaggcagacgccgcggccctcgagcacgacaaagcctacgaccaccagctcaagcaaggggacaacccgtacctcaaatacaaccacgcggacgctgaatttcaggagcgtcttcaagaagatacgtctttcgggggcaacctcgggcgagcagtcttccaggccaaaaagagggtactcgagcctcttggtctggttgaggaagctgttaagacggctcctggaaaaaagagacctatagagcagtctcctgcagaaccggactcttcctcgggcatcggcaaatcaggccagcagcccgctaagaaaagactcaattttggtcagactggcgacacagagtcagtcccagaccctcaaccaatcggagaaccccccgcagccccctctggtgtgggatctaatacaatggcttcaggcggtggggcaccaatggcagacaataacgaaggcgccgacggagtgggtaattcctcgggaaattggcattgcgattccacatggatgggcgacagagttatcaccaccagcacaagaacctgggccctccccacctacaataatcgcctctacaagcaaatctccagcgaatcgggagccaccaacgacaaccactacttcggctacagcaccccctgggggtattttgactttaacagattccactgtcacttctcaccacgtgactggcagcgactcatcaacaacaactggggatttagacccaagaaactcaatttcaagctcttcaacatccaagtcaaggaggtcacgcagaatgatggaaccacgaccatcgccaataaccttaccagcacggtgcaggtcttcacagactctgagtaccagctgccctacgtcctcggttcggctcaccagggctgccttccgccgttcccagcagacgtcttcatgattcctcagtacggctacttgactctgaacaatggcagccaagcggtaggacgttcttcattctactgtctagagtattttccctctcagatgctgaggacgggaaacaacttcaccttcagctacacttttgaagacgtgcctttccacagcagctacgcgcacagccagagtctggatcggctgatgaatcctctcattgaccagtacctgtattacctgagcaaaactcagggtacaagtggaacaacgcagcaatcgagactgcagttcagccaagctgggcctagctccatggctcagcaggccaaaaactggctaccgggacccagctaccgacagcagcgaatgtctaagacggctaatgacaacaacaacagtgaatttgcttggactgcagccaccaaatattacctgaatggaagaaattctctggtcaatcccgggcccccaatggccagtcacaaggacgatgaggaaaagtatttccccatgcacggaaatctcatctttggaaaacaaggcacaggaactaccaatgtggacattgaatcagtgcttattacagacgaagaagaaatcagaacaactaatcctgtggctacagaacaatacggacaggttgccaccaaccatcagagtcagaacaccacagcttcctatggaagtgtggacagccagggaatcttacctggaatggtgtggcaggaccgcgatgtctatcttcaaggtcccatttgggccaaaactcctcacacggacggacactttcatccttctccgctcatgggaggctttggactgaaacaccctcctccccagatcctgatcaaaaacacacctgtgccagcgaatcccgcgaccactttcactcctggaaagtttgcttcgttcattacccagtattccaccggacaggtcagcgtggaaatagagtgggagctgcagaaagaaaacagcaaacgctggaacccagaaattcagtacacctccaactacaacaagtcggtgaatgtggagtttaccgtggacgcaaacggtgtttattctgaaccccgccctattggcactcgttaccttacccggaacttgtaatttcctgttaatgaataaaccgatttatgcgtttcagttgaactttggtctctgcgaagggcgaattc

SEQ ID NO: 4777 - protein, 735 aa, Adeno-associated virus
MAADGYLPDWLEDTLSEGIRQWWKLKPGPPPPKPNQQHRDDSRGLVLPGYKYLGPFNGLDKGEPVNEADAAALEHDKAYDHQLKQGDNPYLKYNHADAEFQERLQEDTSFGGNLGRAVFQAKKRVLEPLGLVEEAVKTAPGKKRPIEQSPAEPDSSSGIGKSGQQPAKKRLNFGQTGDTESVPDPQPIGEPPAAPSGVGSNTMASGGGAPMADNNEGADGVGNSSGNWHCDSTWMGDRVITTSTRTWALPTYNNRLYKQISSESGATNDNHYFGYSTPWGYFDFNRFHCHFSPRDWQRLINNNWGFRPKKLNFKLFNIQVKEVTQNDGTTTIANNLTSTVQVFTDSEYQLPYVLGSAHQGCLPPFPADVFMIPQYGYLTLNNGSQAVGRSSFYCLEYFPSQMLRTGNNFTFSYTFEDVPFHSSYAHSQSLDRLMNPLIDQYLYYLSKTQGTSGTTQQSRLQFSQAGPSSMAQQAKNWLPGPSYRQQRMSKTANDNNNSEFAWTAATKYYLNGRNSLVNPGPPMASHKDDEEKYFPMHGNLIFGKQGTGTTNVDIESVLITDEEEIRTTNPVATEQYGQVATNHQSQNTTASYGSVDSQGILPGMVWQDRDVYLQGPIWAKTPHTDGHFHPSPLMGGFGLKHPPPQILIKNTPVPANPATTFTPGKFASFITQYSTGQVSVEIEWELQKENSKRWNPEIQYTSNYNKSVNVEFTVDANGVYSEPRPIGTRYLTRNL

SEQ ID NO: 4778 - protein, 733 aa, Adeno-associated virus
MAADGYLPDWLEDNLSEGIREWWDLKPGAPKPKANQQKQDDGRGLVLPGYKYLGPFNGLDKGEPVNAADAAALEHDKAYDQQLKAGDNPYLRYNHADAEFQERLQEDTSFGGNLGRAVFQAKKRVLEPLGLVEEGAKTAPGKKRPLESPQEPDSSSGIGKKGKQPAKKRLNFEEDTGAGDGPPEGSDTSAMSSDIEMRAAPGGNAVDAGQGSDGVGNASGDWHCDSTWSEGKVTTTSTRTWVLPTYNNHLYLRLGTTSNSNTYNGFSTPWGYFDFNRFHCHFSPRDWQRLINNNWGLRPKAMRVKIFNIQVKEVTTSNGETTVANNLTSTVQIFADSSYELPYVMDAGQEGSLSPFPNDVFMVPQYGYCGIVTGENQNQTDRNAFYCLEYFPSQMLRTGNNFEMAYNFGKVPFHSMYAYSQSPDRLMNPLLDQYLWHLQSTTSGETLNQGNAATTFGKIRSGDFAFYRKNWLPGPCVKQQRLSKTASQNYKIPASGGNALLKYDTHYTLNNRWSNIAPGPPMATAGPSDGDFSNAQLIFPGPSVTGNTTTSANNLLFTSEEEIAATNPRDTDMFGQIADNNQNATTAPITGNVTAMGVLPGMVWQNRDIYYQGPIWAKIPHADGHFHPSPLIGGFGLKHPPPQIFIKNTPVPANPATTFTAARVDSFITQYSTGQVAVQIEWEIEKERSKRWNPEVQFTSNYGNQSSMLWAPDTTGKYTEPRVIGSRYLTNHL

SEQ ID NO: 4779 - protein, 733 aa, Adeno-associated virus
MAADGYLPDWLEDNLSEGIREWWDLKPGAPKLKANQQKQDDGRGLVLPGYKYLGPFHGLDKGEPVNAADAAALEHDKAYDQQLKAGDNPYLRYNHADAEFQERLQEDTSFGGNLGRAVFQAKKRVLEPLGLVEEGAKTAPGKKRPLESPQEPDSSSGIGKKGKQPAKKRLNFEEDTGAGDGPPEGSDTSAMSSDIEMRAAPGGNAVDAGQGSDGVGNASGDWHCDSTWSEGKVTTTSTRTWVLPTYNNHLYLRLGTTSNSNTYNGFSTPWGYFDFNRFHCHFSPRDWQRLINNNWGLRPKAMRVKIFNIQVKEVTTSNGETTVANNLTSTVQIFADSSYELPYVMDAGQEGSLPPFPNDVFMVPQYGYCGIVTGENQNQTDRNAFYCLEYFPSQMLRTGNNFEMAYNFEKVPFHSMYAHSQSLDRLMNPLLDQYLWHLQSTTSGETLNQGNAATTFGKIRSGDFAFYRKNWLPGPCVKQQRFSKTASQNYKIPASGGNALLKYDTHYTLNNRWSNIAPGPPMATAGPSDGDFSNAQLIFPGPSVTGNTTTSANNLLFTSEGEIAATNPRDTDMFGQIADNNQNATTAPITGNVTAMGVLPGMVWQNRDIYYQGPIWAKIPHADGHFHPSPLIGGFGLKHPPPQIFIKNTPVPANPATTFTAARVDSFITQYSTGQVAVQIEWEIEKERSKRRNPEVQFTSNYGNQSSMLWAPDTTGKYTEPRVIGSRYLTNHL

SEQ ID NO: 4780 - protein, 733 aa, Adeno-associated virus
MAADGYLPDWLEDNLSEGIREWWDLKPGAPKPKANQQKQDDGRGLVLPGYEYLGPFNGLDKGEPVNAADAAALEHDKAYDQQLKAGDNPYLRYNHADAEFQERLQEDTSFGGNLGRAVFQAKKRVLEPLGLVEEGAKTAPGKKRPLESPQEPDSSSGIGKKGKQPAKKRLNFEEDTGAGDGPPEGSDTSAMSSDIEMRAAPGGNAVDAGQGSDGVGNASGDWHCDSTWSEGKVTTTSTRTWVLPTYNNHLYLRLGTTSNSNTYNGFSTPWGYFDFNRFHCHFSPRDWQRLINNNWGLRPKAMRVKIFNIQVKEVTTSNGETTVANNLTSTVQIFADSSYELPYVMDAGQEGSLPPFPNDVFMVPQYGYCGIVTGENQNQTDRNAFYCLEYFPSQMLRTGNNFETAYNFEKVPFHSMYAHSQSLDGLMNPLLDQYLWHLQSTTSGETLNQGNAATTFGKIRSGDFAFYRKNWLPGPCVKQQRFSKTASQNYKIPASGGNALLKYDTHYTLNNRWSNIAPGPPMATAGPSDGDFSNAQLIFPGPSVTGNTTTSANNLLFTSEEEIAATNPRDTDMFGQIADNNQNATTAPITGNVTAMGVLPGMVWQNRDIYYQGPIWAKIPHADGHFHPSPLIGGFGLKHPPPQIFIKNTPVPAYPATTFTAARVDSFITQYSTGQVAVQIEWEIEKERSKRWNPEVQFTSNCGNQSSMLWAPDTTGKYTEPRVIGSRYLTNHL

SEQ ID NO: 4781 - protein, 735 aa, Adeno-associated virus
MAADGYLPDWLEDTLSEGIRQWWKLKPGPPPPKPNQQHRDDSRGLVLPGYKYLGPFNGLDKGEPVNEADAAALEHDKAYDHQLKQGDNPYLKYNHADAEFQERLQEDTSFGGNLGRAVFQAKKRVLEPLGLVEEAVKTAPGKKRPIEQSPAEPDSSSGIGKSGQQPAKKRLNFGQTGDTESVPDPQPIGEPPAAPSGVGSNTMASGGGAPMADNNEGADGVGNSSGNWHCDSTWMGDRVITTSTRTWALPTYNNHLYKQISSESGATNDNHYFGYSTPWGYFDFNRFHCHFSPRDWQRLINNNWGFRPKKLNFKLFNIQVKEVTQNDGTTTIANNLTSTVQVFTDSEYQLPYVLGSAHQGCLPPFPADVFMIPQYGYLTLNNGSQAVGRSSFYCLEYFPSQMLRTGNNFTFSYTFEDVPFHSSYAHSQSLDRLMNPLIDQYLYYLSKTQGTSGTTQQSRLQFSQAGPSSMAQQAKNWLPGPSYRQQRMSKTANDNNNSEFAWTAATKYYLNGRNSLVNPGPPMASHKDDEEKYFPMHGNLIFGKQGTGTTNVDIESVLITDEEEIRTTNPVATEQYGQVATNHQSQNTTASYGSVDSQGILPGMVWQDRDVYLQGPIWAKIPHTDGHFHPSPLMGGFGLKHPPPQILIKNTPVPANPATTFTPGKFASFITQYSTGQVSVEIEWELQKENSKRWNPEIQYTSNYNKSVNVEFTVDANGVYSEPRPIGTRYLTRNL

SEQ ID NO: 4782 - DNA, 3127 bp, Adeno-associated virus
gcggccgcgaattcgcccttcgcagagaccaaagttcaactgaaacgaatcaaccggtttattgattaacatgcaattacagattacgggtgaggtaacgagtgccaatagggcgaggctcagagtaaacaccctggctgtcaacggcaaagtccacaccagtctgcttttcaaagttggaggtgtactgaatctccgggtcccagcgcttgctgttttccttctgcagctcccactcgatttccacgctgacttgtccggtgctgtactgtgtgatgaacgaagcaaacttggcaggagtaaacacctccggaggattagcgggaacgggagtgttcttgatcaggatctgaggaggcggatgtttaagtccaaagccgcccatcaaaggagacgggtgaaagttgccatccgtgtgaggaatcttggcccagatgggaccctgcaggtacacgtcccggttctgccagaccatgccaggtaaggctccctggttgttgacaacttgtgtctgggctgcagtattagccgcttgtaagttgctgctgactatcccgtattcttccgtggctacaggattagtaggacgaatttcttcttcatttgtcattaacacattttccaatgtagttttgttagttgctccagtttttccaaaaatcaggactccgctggatgggaaaaagcggtcctcgtcgtccttgtgagttgccatggcgacgccgggattaaccaacgagtttctgccgttcaggtgatatttggtggcaccagtccaagcaaagttgctgttgttgttttgatccagcgttttggagaccctttgttgccggaagcagggtccaggtaaccaattcttggcttgttcggccatagttgaaggcccgccctggtaaaactgcagttcccgattgccagctgtgcctcctgggtcactctgtgttctggccaggtagtacaagtactggtcgatgaggggattcatcagccggtccaggctctggctgtgtgcgtagctgctgtggaaaggcacgtcctcgaagctgtagctgaactcaaagttgttgcccgttctcagcatctgagaggggaagtactccaggcagtagaaggaggaacgtcccacagactgactgccattgttgagagtcaggtagccgtactgaggaatcatgaagacgtccgccgggaacggaggcaggcagccctggtgcgcagagccgaggacgtacggcagctggtattccgagtccgagaatacctgaatcgtgctggtaaggttattagcgatggtcgtaacgccgtcattcgtcgtgacctccttgacctggatgttgaagagcttgaaccgcagcttcttgggccggaatccccagttgttgttgatgagtcgctgccagtcacgtggtgagaagtggcagtggaatctgttaaagtcaaaatacccccagggggtgctgtagccgaagtaggtgttgtcgttggtactacctgcagtttcactggagatttgctcgtagaggtggttgttgtaggtgggcagggcccaggttcgggtgctggtggtaatgactctgtcgcccagccatgtggaatcgcaatgccaatttcctgaggcattacccactccgtcggcaccttcgttattgtctgccattggtgcgccaccgcctgcagccactgtaccagatcccacactagagggcgctgctggaggttctccgagaggttgagggtcggggactgactctgagtcgccagtctgaccgaaattgagtctctttctggcgggctgctggcccttcttgccgatgcccgtggaggagtcgggggaacgctgaggtgacggctctaccggtctcttctttgcaggagccgtcttagcgccttcctcaaccagaccgagaggttcgagaacccgcttcttggcctggaagactgctcgcccgaggttgcccccaaatgacgtatcttcttgcagacgctcctgaaactcggcgtcggcgtggttataccgcaggtacgggttgtcacccgcattgagctgctggtcgtaggccttgtcgtgctcgagggccgctgcgtccgccgcgttgacgggctcccccttgtcgagtccgttgaagggtccgaggtacttgtagccaggaagcaccagaccccggccgttgtcctgcttttgctggttggctttgggtttcggggctccaggtttcaggtcccaccactcgcgaatgccctcagagaggttgtcctcgagccaatctggaagataaccatcggcagccatacctgatttaaatcatttattgttcaaagatgcagtcatccaaatccacattgaccagatcgcaggcagtgcaagcgtctggcacctttcccatgatatgatgaatgtagcacagtttctgatacgcctttttgacgacagaaacgggtttagattctgacacgggaaagcactctaaacagtctttctgtccgtgagtgaagcagatatttgaattctgattcattctctcgcattgtctgcagggaaacagcatcagattcatgcccacgtgacgagaacatttgttttggtacctgtctgcgtagttgatcgaagcttccgcgtctgacgtcgatggctgcgcaactgactcgcgcacccgtttgggctcacttatatctgcgtcactgggggcgggtcttttcttggctccaccctttttgacgtagaattcatgctccacctcaaccacgtaatcctttgcccaccggaaaaagtctttgacttcctgcttggtgaccttcccaaagtcatgatccagacggcgggtgagttcaaatttgaacatccggtcttgcaacggctgctggtgttcgaaggtcgttgagttcccgtcgatcacggcgcacatgttggtgttggagatgacgatcgcgggagtcgggtctatctgggccgaggacttgcatttctggtccacgcgcaccttgcttcctccgagaatggctttggccgactccacgaccttggcggtcatcttcccctcctcccaccagatcaccatcttgtcgacacagtcgttgaagggaaagttctcattggtccagttgacgcagccgtagaaagggcgaattc

SEQ ID NO: 4783 - DNA, 3106 bp, Adeno-associated virus
gcggccgcgaattcgcccttcgcagagaccaaagttcaactgaaacgaatcaaccggtttattgattaacaagtaattacaggttacgggtgaggtaacgggtgccaatggggcgaggctcagtataaaccccttcgttgttgacagcaaattccacattattagacttggcataatttgaggtgtactgaatctctggattccagcgtttgctgttttctttctgcagttcccactcgatctccacgctgacctggccggtgctgtactgcgtgataaatgaggcaaacttggcaggagtaaacacctctggaggattagcaggtaccggggtgtttttgatgagaatttgaggaggcgggtgtttgagtccaaatccgcccatcaggggagacgggtgaaagttgccgtccgtgtgaggaattttggcccagatgggaccctgcaggcacacgtcccggttctgccagaccatgccgggcagagccccctggctgttgacagtctgtgtctggggtccggccgtagacgattgcaggttgctggagaccacaccgtattcttctgtagccacgggattggtggttttgatctcctcctcgctggtcattagcacgttttccagcgttgtcttgttggcagcccccgttttgccaaaaaccagcactccgttgatgggaaagaactggtcctcgtcgtccttgttggtggccatggctacgcccgggttggttaatgaatttctaccattcagatggtatttagtggccccggtccaggcaaagttactgttgttgttgctgtctatgttttttgacagtctctgctgccgataacagggtccgggcagccagttctttgattgctcggccatggtgttgggcccagcctgatggaactgcagctcccttgtggaccccgtagtgctctgggtccgggccaggtagtacaggtactggtcgatgaggggattcatcagccggtctaggctctggctgtgcacatagctgctgtggaaaggcacttcctcaaaggtgtagctgaattcaaagttattgcccgttctcagcatctgagaaggaaagtactccaggcagtagaaggaggaacgtcccacagactgactgccgttgtttagagtcagatatccgtactgaggaatcatgaacacgtccgcagggaacggagggaggcagccctggtgcgcagagccgaggacgtacggcagttggtactccgagtccgagaagacctgaatcgtgctggtaaggttattagcgatggtcgtaacgccgtcgttcgtcgtgacctccttgacctggatgttgaacaacttgaaccgcagctttctgggccggaatccccagttgttgttgatgagtcgctgccagtcacgtggtgagaagtggcagtggaatctgttgaagtcaaaatagccccagggggtgctgtagctgaagaagtggttgtcgttggtagccccgctctgacttgatatctgcttgtagaggtggttgttgtaggtgggcagggcccaggtgcgggtgctggtggtgatgactctgtcgcccagccatgtggaatcgcaatgccaatttccggaggcattacccactccgtcggcgccttcgttattgtctgccattggtgcgccaccgcctgcagccattgtaccagatcccagacctgagggcgcggcgggaggttctccgagaggttgggggtcgggcactgactctgagtcgccagtctgcccaaagttgagcttctttttagcgggctgctggcctttcttgccgatgcccgtggaggagtcgggggattctatgggtctcttctttccaggagccgtcttagcgacttcctcaaccagaccgagaggttcgagaacccgcttcttggcctggaagactgctcgcccgaggttgcccccaaaagacgtatcttcttgaagacgctcctgaaactcggcgtcggcgtggttgtacttgaggtacgggttgtccccctgctcgagctgcttgtcgtaggccttgtcgtgctcgagggccgcggcgtctgcctcgttgaccggctctcccttgtcgagtccgttgaagggtctgaggtacttgtagccaggaagcaccagaccccggccgtcgtcctgcttttgctggttggctttgggtttcggggctccaggtttcaagtcccaccactcgcgaatgccctcagagaggttgtcctcgagccaatctggaagataaccatcggcagccatacctggtttaagtcatttattgctcagaaacacagtcatccaggtccacgttgaccagatcgcaggccgagcaagcaatctcgggagcccgccccagcagatgatgaatggcacagagtttccgatacgtcctctttctgacgaccggttgagattctgacacgccggggaaacattctgaacagtctctggtcccgtgcgtgaagcaaatgttgaaattctgattcactctctcgcatgtcttgcagggaaacagcatctgaagcatgcccgcgtgacgagaacatttgttttggtacctgtcggcaaagtccaccggagctccttccgcgtctgacgtcgatggattcgcgactgaggggcaggcccgcttgggctcgcttttatccgcgtcatcgggggcgggtctcttgttggccccaccctttctgacgtagaacccatgcgccacctcggtcacgtgatcctgcgcccagcggaagaaccttttgacttcctgctttgtcaccttgccaaagttatgctccagacggcgggtgggttcaaatttgaacatccggtcctgcaacggctgctggtgctcgaaggtggcgctgttcccgtcaatcacggcgcacatgttggtgttggaggtgacggtcacgggggtggggtcgatctgggcggacgacttgcacttttggtccacgcgcaccttgctgccgccgagaatggccttggcggactccacgaccttggccgtcatcttgccctcctcccaccagatcaccatcttgtcggcgcaatcgttgaagggaaagttctcattggtccagttgacgcagccgtagaaagggcgaattc

SEQ ID NO: 4784 - DNA, 3102 bp, Adeno-associated virus
gcggccgcgaattcgcccttcgcagagaccaaagttcaactgaaacgaatcaaccggtttattgattaacaagtaattacaggttacgggtgaggtaacgggtgccaatggggcgaggctcagtataaaccccttcgttgttgacagcaaattccacattattagacttggcataatttgaggtgtactgaatctctggattccagcgtttgctgttttctttctgcagttcccactcgatctccacgctgacctggccggtgctgtactgcgtgataaatgaggcaaacttggcaggagtaaacacctctggaggattagcaggtaccggggtgtttttgatgagaatttgaggaggcgggtgtttgagtccaaatccgcccatcaggggagacgggtgaaagttgccgtccgtgtgaggaatttcggcccagatgggaccctgcaggtacacgtcccggttctgccagaccatgccgggcagagccccctggctgttgacagtctgtgtccggggtccggccgtagacgattgcaggttgctggagaccacaccgtattcttctgtagccacgggattggtggttttgatctcctcctcgctggtcattagcacgttttccagcgttgtcttgttggcagcccccgttttgccaaaaaccagcactccgttgatgggaaggaactggtcctcgtcgtccttgttggtggccatggctacgcccgggttggttaatgaatttctaccattcagatggtatttagtggccccggtccaggcaaagttactgttgttgttgctgtctatgttttttgacagtctctgctgccgataacagggtccgggcagccagttctttgattgctcggccacggtgttgggcccagcctgatggaactgcagctcccttgtggaccccgtagtgctctgggtccgggccaggtagtacaggtactggtcgatgaggggattcatcagccggtccaggctctggctgtgcgcatagctgctgtggaaaggcacttcctcaaaggtgtagctgaattcaaagttattgcccgttctcagcatctgagaaggaaagtactccaggcagcagaaggaggaacgtcccacagactgactgccgttgtttagagtcagatatccgtactgaggaatcatgaacacgtccgcagggaacggagggaggcagccctggtgcgcagagccgaggacgtacggcagttggtactccgagtccgagaagacctgaatcgtgctggtaaggttattagcgatggtcgtaacgccgtcgttcgtcgtgacctccttgacctggatgttgaacaacttgaaccgcagctttctgggccggaatccccagttgttgttgatgagtcgctgccagtcacgtggtgagaagtggcagtggaatctgttgaagtcaaaatagccccagggggtgctgtagccgaagaagtggttgtcgttggtagccccgctctgacttgatatctgcttgtagaggtggttgttgtaggtgggcagggcccaggtgcgggtgctggtggtgatgactctgtcgcccagccatgtggaatcgcaatgccaatttccggaggcattacccactccgtcggcgccttcgttattgtctgccattggtgcgccaccgcctgcagccattgtaccagatcccagacctgagggcgcggcgggaggttctccgagaggttgggggtcgggcactgactctgagtcgccagtctgcccaaagttgagcttctttttagcgggctgctggcctttcttgccgatgcccgtggaggagtcgggggattctatgggtctcttctttccggaagccgtcttagcgccttcctcaaccagaccgagaggttcgagaacccgcttcttggcctggaagactgctcgcccgaggttgcccccaaaagacgtatcttcttgaagacgctcctgaaactcggcgtcggcgtggttgtacttgaggtacgggttgtccccctgctcgagctgcttgtcgtaggccttgtcgtgctcgagggccgcggcgtctgcctcgttgaccggctctcccttgtcgagtccgttgaagggtccgaggtacttgtagccaggaagcaccagaccccggccgtcgtcctgcttttgctggttggctttgggtttcggggctccaggtttcaagtcccaccactcgcgaatgccctcagagaggttgtcctcgagccaatctggaagataaccatcggcagccatacctggtttaagtcatttattgctcagaaacacagtcatccaggtccacgttgaccagatcgcaggccgagcaagcaatctcgggagcccgccccagcagatgatgaatggcacagagtttccgatacgtcctctttctgacgaccggttgagattctgacacgccggggaaacattctgaacagtctctggtcccgtgcgtgaagcaaatgttgaaattctgattcattctctcgcatgtcttgcagggaaacagcatctgaagcatgcccgcgtgacgagaacatttgttttggtacctgtcggcaaagtccaccggagctccttccgcgtctgacgtcgatggatccgcgactgaggggcaagcccgcttgggctcgcttttatccgcgtcatcgggggcgggtctcttgttggctccaccctttctgacgtagaactcatgcgccacctcggtcacgtgatcctgcgcccagcggaagaactctttgacttcctgctttgtcaccttgccaaagtcatgctccagacggcgggtgagttcaaatttgaacatccggtcttgtaacggctgctggtgctcgaaggtggtgctgttcccgtcaatcacggcgcacatgttggtgttggaagtgacgatcacgggggtgggatcgatctgggcggacgacttgcacttttggtccacgcgcaccttgctgccgccgagaatggccttggcggactccacgaccttggccgtcatcttgccctcctcccaccagatcaccatcttgtcgacgcaatcgttgaagggaaagttctcattggtccagttgacgcagccgaagggcgaattc

SEQ ID NO: 4785 - protein, 728 aa, Adeno-associated virus
MAADGYLPDWLEDNLSEGIREWWDLKPGAPKPKANQQKQDDGRGLVLPGYRYLGPFNGLDKGEPVNEADAAALEHDKAYDKQLEQGDNPYLKYNHADAEFQERLQEDTSFGGNLGRAVFQAKKRVLEPLGLVEEGAKTAPGKKRPIESPDSSTGIGKNGQPPAKKKLNFGQTGDSESVPDPQPLGEPPAAPSGLGSGTMAAGGGAPMADNNEGADGVGNASGNWHCDSTWLGDRVITTSTRTWALPTYNNHLYKQISSQSGATNDNHFFGYSTPWGYFDFNRFHCHFSPRDWQRLINNNWGFRPRKLRFKLFNIQVKEVTTNDGVTTIANNLTSTIQVFSDSEYQLPYVLGSAHQGCLPPFPADVFMIPQYGYLTLNNGSQSVGRSSFYCLEYFPSQMLRTGNNFEFSYTFEEVPFHSSYAHSQSLDRLMNPLIDQYLYYLARTQSTTGSTRELQFHQAGPNTMAEQSKNWLPGPCYRQQRLSKNIDSNNNSNFAWTGATKYHLNGRNSLTNPGVAMATNKDDEDQFFPINGVLVFGKTGAANKTTLENVLMTSEEEIKTTNPVATEEYGVVSSNLQSSTAGPQTQTVNSQGALPGMVWQNRDVYLQGPIWAKIPHTDGNFHPSPLMGGFGLKHPPPQILIKNTPVPANPPEVFTPAKFASFITQYSTGQVSVEIEWELQKENSKRWNPEIQYTSNYAKSNNVEFAVNNEGVYTEPRPIGTRYLTRNL

SEQ ID NO: 4786 - DNA, 2187 bp, Adeno-associated virus
atggctgccgatggttatcttccagattggctcgagggcaacctctctgagggcattcgcgagtggtgggacttgaaacctggagccccgaaacccaaagccaaccagcaaaagcaggacgacggccggggtctggtgcttcctggctacaggtacctcggacccttcaacggactcgacaagggagagccggtcaacgaggcagacgccgcggccctcgagcacgacaaggcctacgacaagcagctcgagcagggggacaacccgtacctcaagtacaaccacgccgacgccgagtttcaggagcgtcttcaagaagatacgtcttttgggggcaacctcgggcgagcagtcttccaggccaagaagcgggttctcgaacctctcggtctggttgaggaaggcgctaagacggctcctggaaagaagagacccatagaatcccccgactcctccacgggcatcggcaagaacggccagccgcccgctaaaaagaagctcaactttgggcagactggcgactcagagtcagtgcccgacccccaacctctcggagaacctcccgccgcgccctcaggtctgggatctggtacaatggctgcaggcggtggcgcaccaatggcagacaataacgaaggcgccgacggagtgggtaatgcctccggaaattggcattgcgattccacatggctgggcgacagagtcatcaccaccagcacccgcacctgggccctgcccacctacaacaaccacctctacaagcagatatcaagtcagagcggggctaccaacgacaaccacttcttcggctacagcaccccctggggctattttgacttcaacagattccactgccacttctcaccacgtgactggcagcgactcatcaacaacaactggggattccggcccagaaagctgcggttcaagttgttcaacatccaggtcaaggaggtcacgacgaacgacggcgttacgaccatcgctaataaccttaccagcacgattcaggtcttctcggactcggagtaccaactgccgtacgtcctcggctctgcgcaccagggctgcctccctccgttccctgcggacgtgttcatgattcctcagtacggatatctgactctaaacaacggcagtcagtctgtgggacgttcctccttctactgcctggagtactttccttctcagatgctgagaacgggcgataactttgaattcagctacacctttgaggaagtgcctttccacagcagctatgcgcacagccagagcctggaccggctgatgaatcccctcatcgaccagtacctgtactacctggcccggacccagagcactacggggtccacaagggagctgcagttccatcaggctgggcccaacaccatggccgagcaatcaaagaactggctgcccggaccctgttatcggcagcagagactgtcaaaaaacatagacagcaacaacaacagtaactttgcctggaccggggccactaaataccatctgaatggtagaaattcattaaccaacccgggcgtagccatggccaccaacaaggacgacgaggaccagttctttcccatcaacggagtgctggtttttggcaaaacgggggctgccaacaagacaacgctggaaaacgtgctaatgaccagcgaggaggagatcaaaaccaccaatcccgtggctacagaagaatacggtgtggtctccagcaacctgcaatcgtctacggccggaccccagacacagactgtcaacagccagggggctctgcccggcatggtctggcagaaccgggacgtgtacctgcagggtcccatctgggccaaaattcctcacacggacggcaactttcacccgtctcccctgatgggcggatttggactcaaacacccgcctcctcaaattctcatcaaaaacaccccggtacctgctaatcctccagaggtgtttactcctgccaagtttgcctcatttatcacgcagtacagcaccggccaggtcagcgtggagatcgagtgggaactgcagaaagaaaacagcaaacgctggaatccagagattcagtacacctcaaattatgccaagtctaataatgtggaatttgctgtcaacaacgaaggggtttatactgagcctcgccccattggcacccgttacctcacccgtaacctgtaa

SEQ ID NO: 4787 - protein, 728 aa, Adeno-associated virus; identical to SEQ ID NO: 4766

SEQ ID NO: 4788 - DNA, 3106 bp, Adeno-associated virus
gcggccgcgaattcgcccttcgcagagaccaaagttcaactgaaacgaatcagccggtttattgattaacaagtaattacaggttacgggtgaggtaacgggtgccaatggggcgaggctcagtataaaccccttcgttgttgacagcaaattccacattattagacttggcataatttgaggtgtactgaatctctggattccagcgtttgctgttttctttctgcagttcccactcgatctccacgctgacctggccggtgctgtactgcgtgataaatgaggcaaacttggcaggagtaaacacctctggaggattagcaggtaccggggtgtttttgatgagaatttgaggaggcgggtgtttgagtccaaatccgcccatcaggggagacgggtgaaagttgccgtccgtgtgaggaattttggcccagatgggaccctgcaggtacacgtcccggttctgccagaccatgccgggcagagccccctggctgttgacagtctgtgtctggggtccggccgtagacgattgcaggttgctggagaccacaccgtattcttctgtagccacgggattggtggttttgatctcctcctcgctggtcattagcacgttttccagcgttgtcttgttggcagcccccgttttgccaaaaaccagcactccgttgatgggaaagaactggtcctcgtcgtccttgttggtggccatggctacgcccgggttggttaatgaatttctaccattcagatggtatttagtggccccggtccaggcaaagttactgttgttgttgctgtctatgttttttgacagtctctgctgccgataacagggtccgggcagccagttctttgattgctcggccatggtgttgggcccagcctgatggaactgcagctcccttgtggaccccgtagtgctctgggtccgggccaggtagtacaggtactggtcgatgaggggattcatcagccggtccaggctctggctgtgcgcatagctgctgtggaaaggcacttcctcaaaggtgtagctgaattcaaagttatcgcccgttctcagcatctgagaaggaaagtactccaggcagtagaaggaggaacgtcccacagactgactgccgttgtttagagtcagatatccgtactgaggaatcatgaacacgtccgcagggaacggagggaggcagccctggtgcgcagagccgaggacgtacggcagttggtactccgagtccgagaagacctgaatcgtgctggtaaggttattagcgatggtcgtaacgccgtcgttcgtcgtgacctccttgacctggatgttgaacaacttgaaccgcagctttctgggccggaatccccagttgttgttgatgagtcgctgccagtcacgtggtgagaagtggcagtggaatctgttgaagtcaaaatagccccagggggtgctgtagccgaagaagtggttgtcgttggtagccccgctctgacttgatatctgcttgtagaggtggttgttgtaggtgggcagggcccaggtgcgggtgctggtggtgatgactctgtcgcccagccatgtggaatcgcaatgccaatttccggaggcattacccactccgtcggcgccttcgttattgtctgccattggtgcgccaccgcctgcagccattgtaccagatcccagacctgagggcgcggcgggaggttctccgagaggttgggggtcgggcactgactctgagtcgccagtctgcccaaagttgagcttctttttagcgggcggctggccgttcttgccgatgcccgtggaggagtcgggggattctatgggtctcttctttccaggagccgtcttagcgccttcctcaaccagaccgagaggttcgagaacccgcttcttggcctggaagactgctcgcccgaggttgcccccaaaagacgtatcttcttgaagacgctcctgaaactcggcgtcggcgtggttgtacttgaggtacgggttgtccccctgctcgagctgcttgtcgtaggccttgtcgtgctcgagggccgcggcgtctgcctcgttgaccggctctcccttgtcgagtccgttgaagggtccgaggtacctgtagccaggaagcaccagaccccggccgtcgtcctgcttttgctggttggctttgggtttcggggctccaggtttcaagtcccaccactcgcgaatgccctcagagaggttgccctcgagccaatctggaagataaccatcggcagccatacctggtttaagtcatttattgctcagaaacacagtcatccaggtccacgttggccagatcgcaggccgagcaagcaatctcgggagcccgccccagcagatgatgaatggcacagagtttccgatacgtcctctttctgacgaccggttgagattctgacacgccggggaaacattctgaacagtctctggtcccgtgcgtgaagcaaatgttgaaattctgattcattctctcgcatgtcttgcaggggaacagcatctgaagcatgcccgcgtgacgagaacatttgttttggtacctgtcggcaaagtccaccggagctccttccgcgtctgacgtcgatggatccgcgactgaggggcaggcccgcttgggctcgcttttatccgcgtcatcgggggcgggtctcttgttggctccaccctttctgacgtagaactcatacgccacctcggtcacgtgatcctgcgcccagcggaagaactctttgacttcctgctttgtcaccttgccaaagtcatgctccagacggcgggtgagttcaaatttgaacatccggtcttgtaacggctgctggtgctcgaaggtggtgctgttcccgtcaatcacggcgcacatgttggtgttggaagtgacgatcacgggggtgggatcgatctgggcggacgacttgcacttttggtccacgcgcaccttgctgccgccgagaatggccttggcggactccacgaccttggccgtcatcctgccctcctcccaccagatcaccatcttgtcgacgcaatcgttgaagggaaagttctcattggtccagttgacgcagccgtagaaagggcgaattc

SEQ ID NO: 4789 - protein, 728 aa, Adeno-associated virus
MAADGYLPDWLEDNLSEGIREWWDLKPGAPKPKANQQKQDDGRGLVLPGYRYLGPFNGLDKGEPVNEADAAALEHDKAYDKQLEQGDNPYLKYNHADAEFQERLQEDTSFGGNLGRAVFQAKKRVLEPLGLVEEGAKTAPGKKRPIESPDSSTGIGKNGQPPAKKKLNFGQTGDSESVPDPQPLGEPPAAPSGLGSGTMAAGGGAPMADNNEGADGVGNASGNWHCDSTWLGDRVITTSTRTWALPTYNNHLYKQISSQSGATNDNHFFGYSTPWGYFDFNRFHCHFSPRDWQRLINNNWGFRPRKLRFKLFNIQVKEVTTNDGVTTIANNLTSTIQVFSDSEYQLPYVLGSAHQGCLPPFPADVFMIPQYGYLTLNNGSQSVGRSSFYCLEYFPSQMLRTGDNFEFSYTFEEVPFHSSYAHSQSLDRLMNPLIDQYLYYLARTQSTTGSTRELQFHQAGPNTMAEQSKNWLPGPCYRQQRLSKNIDSNNNSNFAWTGATKYHLNGRNSLTNPGVAMATNKDDEDQFFPINGVLVFGKTGAANKTTLENVLMTSEEEIKTTNPVATEEYGVVSSNLQSSTAGPQTQTVNSQGALPGMVWQNRDVYLQGPIWAKIPHTDGNFHPSPLMGGFGLKHPPPQILIKNTPVPANPPEVFTPAKFASFITQYSTGQVSVEIEWELQKENSKRWNPEIQYTSNYAKSNNVEFAVNNEGVYTEPRPIGTRYLTRNL

SEQ ID NO: 4790 - protein, 728 aa, Adeno-associated virus; identical to SEQ ID NO: 4785

SEQ ID NO: 4791 - protein, 728 aa, Adeno-associated virus
MAADGYLPDWLEDNLSEGIREWWDLKPGAPKPKANQQKQDDGRGLVLPGYKYLGPFNGLDKGEPVNEADAAALEHDKAYDKQLEQGDNPYLKYNHADAEFQERLQEDTSFGGNLGRAVFQAKKRVLEPLGLVEEGAKTAPGKKRPIESPDSSTGIGKNGQPPAKKKLNFGQTGDSESVPDPQPLGEPPAAPSGLGSGTMAAGGGAPMADNNEGADGVGNASGNWHCDSTWLGDRVITTSTRTWALPTYNNHLYKQISSQSGATNDNHFFGYSTPWGYFDFNRFHCHFSPRDWQRLINNNWGFRPRKLRFKLFNIQVKEVTTNDGVTTIANNLTSTIQVFSDSEYQLPYVLGSAHQGCLPPFPADVFMIPQYGYLTLNNGSQSVGRSSFYCLEYFPSQMLRTGNNFEFSYTFEEVPFHSSYAHSQSLDRLMNPLIDQYLYYLARTQSTTGSTRELQFHQAGPNTMAEQSKNWLPGPCYRQQRLSKNIDSNNNSNFAWTGATKYHLNGRNSLTNPGVAMATNKDDEDQFFPINGVLVFGKTGAANKTTLENVLMTSEEEIKTTNPVATEEYGVVSSNLQSSTAGPQTQTVNSQGALPGMVWQNRDVYLQGPIWAKIPHTDGNFHPSPLMGGFGLKHPPPQILIKNTPVPANPPEVFTPAKFASFITQYSTGQVSVEIEWELQKENSKRWNPEIQYTSNYAKSNNVEFAVNNEGVYTEPRPIGTRYLTRNL

SEQ ID NO: 4792 - protein, 728 aa, Adeno-associated virus
MAADGYLPDWLEDNLSEGIREWWDLKPGAPKPKANQQKQDDGRGLVLPGYKYLGPFNGLDKGEPVNEADAAALEHDKAYDKQLEQGDNPYLKYNHADAEFQERLQEDTSFGGNLGRAVFQAKKRVLEPLGLVEEGAKTAPGKKRPIESPDSSTGIGKKGQQPAKKKLNFGQTGDSESVPDPQPLGEPPAAPSGLGSGTMAAGGGAPMADNNEGADGVGNASGNWHCDSTWLGDRVITTSTRTWALPTYNNHLYKQISSQSGATNDNHFFGYSTPWGYFDFNRFHCHFSPRDWQRLINNNWGFRPRKLRFKLFNIQVKEVTTNDGVTTIANNLTSTIQVFSDSEYQLPYVLGSAHQGCLPPFPADVFMIPQYGYLTLNNGSQSVGRSSFYCLEYFPSQMLRTGNNFEFSYTFEEVPFHSSYAHSQSLDRLMNPLIDQYLYYLARTQSTTGSTRELQFHQAGPNTMAEQSKNWLPGPCYRQQRLSKNIDSNNNSNFAWTGATKYHLNGRNSLTNPGVAMATNKDDEDQFFPINGVLVFGKTGAANKTTLENVLMTSEEEIKTTNPVATEEYGVVSSNLQSSTAGPQTQTVNSQGALPGMVWQNRDVYLQGPIWAKIPHTDGNFHPSPLMGGFGLKHPPPQILIKNTPVPANPPEVFTPAKFASFITQYSTGQVSVEIEWELQKENSKRWNPEIQYTSNYAKSNNVEFAVNNEGVYTEPRPIGTRYLTRNL

SEQ ID NO: 4793 - DNA, 3098 bp, Adeno-associated virus
gaattcgcccttcgcagagaccaaagttcaactgaaacgaatcaaccggtttattgattaacaagtaattacaggttacgggtgaggtaacgggtgccaatggggcgaggctcagtataaaccccttcgttgttgacagcaaattccacattattagacttggcataatttgaggtgtactgaatctctggattccagcgtttgctgttttctttctgcagttcccactcgatctccacgctgacctggccggtgctgtactgcgtgataaatgaggcaaactaggcaggagtaaacacccctggaggattagcaggtaccggggtgtttttgatgagaatttgaggaggcgggtgtttgagtccaaatccgcccatcaggggagacgggtgaaagttgccgtccgtgtgaggaattttggcccagatgggaccctgcaggtacacgtcccggttctgccagaccatgccgggcagagccccctggctgttgacagtctgtgtctggggtccggccgtagacgattgcaggttgctggagaccacaccgtattcttctgtagccacgggattggtggttttgatctcctcctcgctggtcattagcacgttttccagcgttgtcttgttggcagcccccgttttgccaaaaaccagcactccgttgatgggaaagaactggccctcgtcgtccttgttggtggccatggctacgcccgggttggttaatgaatttctaccattcagatggtatttagtggccccggtccaggcaaagttactgttgttgttgctgtctatgttttttgacagtctctgctgccgataacagggtccgggcagccagttctttgattgctcggccatggtgttgggcccagcctgatggaactgcagctcccttgtggaccccgtagtgctctgggtccgggccaggtagtacaggtactggtcgatgaggggattcatcagccggtccaggctctggctgtgcgcatagctgctgtggaaaggcacttcctcaaaggtgtagctgaattcaaagttattgcccgttctcagcatctgagaaggaaagtactccaggcagtagaaggaggaacgtcccatagactgactgccgttgtttagagtcagatatccgtactgaggaatcatgaacacgtccgcagggaacggagggaggcagccctggtgcgcagagccgaggacgtacggcagttggtactccgagtccgagaagacctgaatcgtgctggtaaggttattagcgatggtcgtaacgccgtcgttcgtcgtgacctccttgacctggatgttgaacaacttgaaccgcagctttctgggccggaatccccagttgttgttgatgagtcgctgccagtcacgtggtgagaagtggcagtggaatctgttgaagtcaaaatagccccagggggtgctgtagccgaagaagtggttgtcgttggtagccccgctctgacttgatatctgcttgtagaggtggttgttgtaggtgggcagggcccaggtgcgggtgctggtggtgatgactctgtcgcccagccatgtggaatcgcaatgccaatttccggaggcattacccactccgtcggcgccttcgttattgtctgccattggtgcgccaccgcctgcagccattgtaccagatcccagacctgagggcgcggcgggaggttctccgagaggttgggggtcgggcactgactctgagtcgccagtctgcccaaagttgagcttctttttagcgggctgctggcctttcttgccgatgcccgtggaggagtcgggggattctatgggtctcttctttccaggagccgtcttagcgccttcctcaaccagaccgagaggttcgagaacccgcttcttggcctggaagactgctcgcccgaggttgcccccaaaagacgtatcttcttgaagacgctcctgaaactcagcgtcggcgtggttgtacttgaggtacgggttgtccccctgctcgagctgcttgtcgtaggccttgtcgtgctcgagggccgcggcgtctgcctcgttgaccggctctcccttgtcgagtccgttgaagggtccgaggtacttgtagccaggaagcaccagaccccggccgtcgtcctgcttttgctggttggctttgggtttcggggctccaggtttcaagtcccaccactcgcgaatgccctcagagaggttgtcctcgagccaatctggaagataaccatcggcagccatacctggtttaagtcatttattgctcagaaacacagtcatccaggtccacgttgaccagatcgcaggccgagcaagcaatctcgggagcccgccccagcagatgatgaatggcacagagtttccgatacgtcctctttctgacgaccggttgagattctgacacgccggggaaacattctgaacagtctctggtcccgtgcgtgaagcaaatgttgaaattctgattcattctctcgcatgtcttgcagggaaacagcatctgaagcatgcccgcgtgacgagaacatttgttttggtacctgtcggcaaagtccaccggagctccttccgcgtctgacgtcgatggatccgcgactgaggggcaggcccgcttgggctcgcttttatccgcgtcatcgggggcgggcctcttgttggctccaccctttctgacgtagaactcatgcgccacctcggtcacgtgatcctgcgcccagcggaagaactctttgacttcctgctttgtcaccttgccaaagtcctgctccagacggcgggtgagttcaaatttgaacatccggtcttgtaacggctgctggtgctcgaaggtggtgctgttcccgtcaatcacggcgcacatgttggtgttggaagtgacgatcacgggggtgggatcgatctgggcggacgacttgcacttttggtccacgcgcaccttgctgccgccgagaatggccttggcggactccacgaccttggccgtcatcttgccctcctcccaccagatcaccatcttgtcgacgcaatcgttgaagggaaagttctcattggtccagttgacgcagccgtagaaagggcgaattc

SEQ ID NO: 4794 - protein, 729 aa, Adeno-associated virus
MAADGYLPDWLEDNLSEGIREWWDLKPGAPKPKANQQKQDDGRGLVLPGYKYLGPFNGLDKGEPVNAADAAALEHDKAYDQQLKAGDNPYLRYNHADAEFQERLQEDTSFGGNLGRAVFQAKKRVLEPLGLVEEGAKTAPGKKRPIDSPDSSTGIGKKGQQPAKKKLNFGQTGDSESVPDPQPLGEPPAAPSSVGSGTMAAGGGAPMADNNEGADGVGNASGNWHCDSTWLGDRVITTSTRTWALPTYNNHLYKQISSSSSGATNDNHYFGYSTPWGYFDFNRFHCHFSPRDWQRLINNNWGFRPKKLRFKLFNIQVKEVTTNDGVTTIANNLTSTVQVFSDSEYQLPYVLGSAHQGCLPPFPADVFMIPQYGYLTLNNGSQSVGRSSFYCLEYFPSQMLRTGNNFEFSYSFEDVPFHSSYAHSQSLDRLMNPLIDQYLYYLARTQSTTGSTRELQFHQAGPNTMAEQSKNWLPGPCYRQQGLSKNLDFNNNSNFAWTAATKYHLNGRNSLTNPGIPMATNKDDEDQFFPINGVLVFGKTGAANKTTLENVLMTSEEEIKTTNPVATEEYGVVSSNLQPSTAGPQSQTINSQGALPGMVWQNRDVYLQGPIWAKIPHTDGNFHPSPLMGGFGLKHPPPQILIKNTPVPANPPEVFTPAKFASFITQYSTGQVSVEIEWELQKENSKRWNPEIQYTSNYAKSNNVEFAVNPDGVYTEPRPIGTRYLPRNL

SEQ ID NO: 4795 - protein, 1458 aa, Adeno-associated virus
MAADGYLPDWLEDNLSEGIREWWDLKPGAPKPKANQQKQDDGRGLVLPGYKYLGPFNGLDKGEPVNAADAAALEHDKAYDQQLKAGDNPYLRYNHADAEFQERLQEDTSFGGNLGRAVFQAKKRVLEPLGLVEEGAKTAPGKKRPIDSPDSSTGIGKKGQQPAKKKLNFGQTGDSESVPDPQPLGEPPAAPSSVGSGTMAAGGGAPTADNNEGADGVGNASGNWHCDSTWLGDRVITTSTRTWALPTYNNHLYKQISSSSSGATNDNHYFGYSTPWGYFDFNRFHCHFSPRDWQRLINNNWGFRPKKLRFKLFNIQVKEVTTNDGVTTIANNLTSTVQVFSDSEYQLPYVLGSAHQGCLPPFPADVFMIPQYGYLTLNNGSQSVGRSSFYCLEYFPSQMLRTGNNFEFSYSFEDVPFHSSYAHSQSLDRLMNPLIDQYLYYLARTQSTTGSTRELQFHQAGPNTMAEQSKNWLPGPCYRQQRLSKNLDFNNNSNFAWTAATKYHLNGRNSLTNPGIPMATNKDDEDQFFPINGVLVFGKTGAANKTTLENVLMTSEEEIKTTNPVATEEYGVVSSNLQSSTAGPQSQTINSQGALPGMVWQNRDVYLQGPIWAKIPHTDGNFHPSPLMGGFGLEHPPPQILIKNTPVPANPPEVFTPAKFASFITQYSTGQVSVEIEWELQKENSKRWNPEIQYTSNYAKSNNVEFAVNPDGVYTEPRPIGTRYLTRNLMAADGYLPDWLEDNLSEGIREWWDLKPGAPKPKANQQKQDDGRGLVLPGYKYLGPFNGLDKGEPVNAADAAALEHDKAYDQQLKAGDNPYLRYNHADAEFQERLQEDTSFGGNLGRAVFQAKKRVLEPLGLVEEGAKTAPGKKRPIGSPDSSTGIGKKGQQPAKKKLNFGQTGDSESVPDPQPLGEPPAAPSSVGSGTMAAGGGAPMADNNEGADGVGNASGNWHCDSTWLGDRVITTSTRTWALPTYNNHLYKQISSSSSGATNDNHYFGYSTPWGYFDFNRFHCHFSPRDWQRLINNNWGFRPKKLRFKLLNIQVKEVTTNDGVTTIANNLTSTVQVFSDSEYQLPYVLGSAHQGCLPPFPADVFMIPQYGYLTLDNGSQSVGRSSFYCLEYFPSQMLRTGNNFEFSYSFEDVPFHSSYAHSQSLDRLMNPLIDQYLYYLARTQSTTGSTRELQFHQAGPNTMAEQSKNWLPGPCYRQQRLSKNLDFNNNSNFAWTAATKYHLNGRNSLTNPGIPMATNKDDEDQFFPINGVLVFGKTGAANKTTLENVLMTSEEEIKTTNPVATEEYGVVSSNLQSSTAGPQSQTINSQGALPGMVWQNRDVYLQGPIWAKIPHTDGNFHPSPLMGGFGLKHPPPQILIKNTPVPANPPEVFTPAKFASFITQYSTGQVSVEIEWELQKENSKRWNPEIQYTSNYAKSNNVEFAVNPDGVYTEPRPIGTRYLTRNL

SEQ ID NO: 4796 - protein, 729 aa, Adeno-associated virus
MAADGYLPDWLEDNLSEGIREWWDLKPGAPKPKANQQKQDDGRGLVLPGYKYLGPFNGLDKGEPVNAADAAALEHDKAYDQQLKAGDNPYLRYNHADAEFQERLQEDTSFGGNLGRAVFQAKKRVLEPLGLVEEGAKTAPGKKRPIDSPDSSTGIGKKGQQPAKKKLNFGQTGDSESVPDPQPLGEPPAAPSSVGSGTMAAGGGAPTADNNEGADGVGNASGNWHCDSTWLGDRVITTSTRTWALPTYNNHLYKQISSSSSGATNDNHYFGYSTPWGYFDFNRFHCHFSPRDWQRLINNNWGFRPKKLRFKLFNIQVKEVTTNDGVTTIANNLTSTVQVFSDSEYQLPYVLGSAHQGCLPPFPADVFMIPQYGYLTLNNGSQSVGRSSFYCLEYFPSQMLRTGNNFEFSYSFEDVPFHSSYAHSQSLDRLMNPLIDQYLYYLARTQSTTGSTRELQFHQAGPNTMAEQSKNWLPGPCYRQQRLSKNLDFNNNSNFAWTAATKYHLNGRNSLTNPGIPMATNKDDEDQFFPINGVLVFGKTGAANKTTLENVLMTSEEEIKTTNPVATEEYGVVSSNLQSSTAGPQSQTINSQGALPGMVWQNRDVYLQGPIWAKIPHTDGNFHPSPLMGGFGLEHPPPQILIKNTPVPANPPEVFTPAKFASFITQYSTGQVSVEIEWELQKENSKRWNPEIQYTSNYAKSNNVEFAVNPDGVYTEPRPIGTRYLTRNL

SEQ ID NO: 4797 - DNA, 3075 bp, Adeno-associated virus
tgagaactttcctttcaacgattgcgtcggacaagatggtgatctggtgggaggaggggaagatgaccgccaaggtcgtggagtcggccaaagccattcttggaggaagcaaggtgcgtgtggaccagaaatgcaagtcctcggcccagatagacccgactcccgtgatcgtcacctccaacaccaacatgtgcgccgtgattgacgggaactcaacgaccttcgagcaccagcagccgttgcaagaccggatgttcaaatttgaacttacccgccgtctggatcatgactttggaaaggtcaccaagcaggaagtgaaagactttttccggtgggcaaaggatcacgtggttgaggtggagcatgaattctacgtcaaaaagggtggagctaagaaaagacccgcccccagtgacgcagatataagtgagcccaaacgggcgcgcgagtcagttgcgcagccatcaacgtcagacgcggaagcttcgatcaactacgcggacaggtaccaaaaacaaatgttctcgtcacgtgggcatgaatctgatgctgtttccctgcagacaatgcgagagaatgaatcagaattcaaatatctgcttcactcacggacagaaagactgtttagagtgctttcccgtgtcagaatctcaacccgtttctgtcgtcaaaaaggcgtatcagaaactgtgctacattcatcatatcatgggaaaggtgccagacgcttgcactgcctgcgatctggtcaatgtggatttggatgactgcatctctgaacaataaatgatttaaatcaggtatggctgccgatggttatcctccagattggctcgaggacactctctctgaagggataagacagtggtggaagctcaaacctggcccaccaccaccaaagcccgcagagcggcataaggacgacagcaggggtcttgtgcttcctgggtacaagtacctcggacccttcaacggactcgacaagggggagccggtcaacgaggcagacgccgcggccctcgagcacgacaaggcctacgaccggcagctcgacagcggagacaacccgtacctcaagtacaaccacgccgacgcagagtttcaggagcgccttaaagaagatacgtcttttgggggcaacctcggacgagcagtcttccaggcgaaaaagagggttcttgaacctctgggcctggttgaggaacctgttaagacggctccgggaaaaaagaggccggtagagcactctcctgtggagccagactcctcctcgggaaccggaaaagcgggccagcggcctgcaagaaaaagattaaattttggtcagactggagacgcagactccgtacctgacccccagcctctcggacagccaccagcagccccctctggtctgggatctactacaatggctacaggcagtggcgcaccaatggcagacaataacgagggtgccgatggagtgggtaattcctcaggaaattggcattgcgattcccaatggctgggcgacagagtcatcaccaccagcacccgaacctgggccctgcccacatacaacaaccacctctacaagcaaatctccagccaatcaggagccagcaacgacaaccactactttggctacagcaccccctgggggtattttgacttcaacagattccactgccacttttcaccacgtgactggcaaagactcatcaacaacaactggggattccggcccaaaagactcaacttcaagctctttaatattcaagtcaaagaggtcacgcagaatgacggtacgacgacgattgccaataaccttaccagcacggttcaggtgtttactgactcggagtaccagctcccgtacgtcctgggctcggcgcatcaaggatgcctcccgccgtttccagcggacgtcttcatggtcccacagtatggatacctcaccctgaacaacgggagtcaggcggtaggacgctcttccttttactgcctggagtactttccttctcagatgctgcgtactggaaacaactttcagttcagctacacttttgaagacgtgcctttccacagcagctacgctcacagccagagtctggatcggctgatgaatcctctgatcgaccagtacctgtattatctgaacaagacacaaacaaatagtggaactcttcagcagtctcggctactgtttagccaagctggaccaaccaacatgtctcttcaagctaaaaactggctgcctggaccttgctacagacagcagcgtctgtcaaaacaggcaaacgacaacaacaacagcaactttccctggactgcagctacaaagtatcatctaaatggccgggactcgttggttaatccaggaccagctatggccagtcacaaggatgacgaagaaaagtttttccccatgcatggaaccctgatatttggtaaacaaggaacaaatgccaacgacgcggatttggaaaatgtcatgattacagatgaagaagaaatcagggccaccaatcccgtggctacggagcagtacgggactgtgtcaaataatttgcaaaactcaaacactggtccaactactggaactgtcaatcgccaaggagcgttacctggtatggtgtggcaggatcgagacgtgtacctgcagggacccatttgggccaagattcctcacaccgatggacactttcatccttctccactgatgggaggttttggactcaaacacccgcctcctcagatcatgatcaaaaacactcccgttccagccaatcctcccacaaacttcagttctgccaagtttgcttctttcatcacacagtattccacgggacaggtcagcgtggagatcgagtgggagctgcagaaggagaacagcaaacgctggaatcccgaaattcagtacacttccaactacaacaagtctgttaatgtggactttactgtggacactaatggtgtgtattcagagcctcgccccattggcaccagatacctgactcgtaatctgtaattgcttgttaatcaataaaccgtttaattcgtttcagttgaactttggtctctgcgaagggcgaa

SEQ ID NO: 4798 - DNA, 3142 bp, Adeno-associated virus
aaaacgacgggccagtgattgtaatacgactcactatagggcgaaattgaaattagcggccgcgaattcgcctttcgcagagaccaaagttcaactgaaacgaattaaacggtttattgattaacaagcaattacagattacgagtcaggtatctggtgccaatggggcgaggctctgaatacacaccattagtgtccacagtaaagtccacattaacagacttgttgtagttggaagtgtactgaatttcgggattccagcgtttgctgttctccttctgcagctcccactcgatctccacgctgacctgtcccgtggaatactgtgtgatgaaagaagcaaacttggcagaactgaagtttgtgggaggattggctggaacgggagtgtttttgatcatgatctgaggaggcgggtgtttgagtccaaaacctcccatcagtggagaaggatgaaagtgtccatcggtgtgaggaatcttggcccaaatgggtccctgcaggtacacgtctcgatcctgccacaccataccaggtaacgctccttggtgattgacagttccagtagttggaccagtgtttgagttttgcaaattatttgacacagtcccgtactgctccgtagccacgggattggtggccctgatttcttcttcatctgtaatcatgacattttccaaatccgcgtcgttggcatttgttccttgtttaccaaatatcagggttccatgcatggggaaaaacttttcttcgtcatccttgtgactggccatagctggtcctggattaaccaacgagtcccggccatttagatgatactttgtagctgcagtccagggaaagttgctgttgttgttgtcgtttgcctgttttgacagacgctgctgtctgtagcaaggtccaggcagccagtttttagcttgaagagacatgttggttggtccagcttggctaaacagtagccgagactgctgaagagttccactatttgtttgtgtcttgttcagataatacaggtactggtcgatcagaggattcatcagccgatccagactctggctgtgagcgtagctgctgtggaaaggcacgtcttcaaaagtgtagctgaactgaaagttgtttccagtacgcagcatctgagaaggaaagtactccaggcagtaaaaggaagagcgtcctaccgcctgactcccgttgttcagggtgaggtatccatactgtgggaccatgaagacgtccgctggaaacggcgggaggcatccttgatgcgccgagcccaggacgtacgggagctggtactccgagtcagtaaacacctgaaccgtgctggtaaggttattggcaatcgtcgtcgtaccgtcattctgcgtgacctctttgacttgaatattaaagagcttgaagttgagtcttttgggccggaatccccggttgttgttgacgagtctttgccagtcacgtggtgaaaagtggcagtggaatctgttgaagtcaaaatacccccagggggtgctgtagccaaagtagtggttgtcgttgctggctcctgattggctggagatttgcttgtagaggtggttgttgtatgtgggcagggcccaggttcgggtgctggtggtgatgactctgtcgcccagccattgggaatcgcaatgccaatttcctgaggaattacccactccatcggcaccctcgttattgtctgccattggtgcgccactgcctgtagccattgtagtagatcccagaccagagggggctgctggtggctgtccgagaggctgggggtcaggtacggagtctgcgtctccagtctgaccaaaatttaatctttttcttgcaggctgctggcccgcttttccggttcccgaggaggagtctggctccacaggagagtgctctaccggcctcttttttcccggagccgtcttaacaggctcctcaaccaggcccagaggttcaagaaccctctttttcgcctggaagactgctcgtccgaggttgcccccaaaagacgtatcttctttaaggcgctcctgaaactctgcgtcggcgtggttgtacttgaggtacgggttgtctccgctgtcgagctgccggtcgtaggccttgtcgtgctcgagggccgcggcgtctgcctcgttgaccggctcccccttgtcgagtccgttgaagggtccgaggtacttgtacccaggaagcacaagacccctgctgtcgtccttatgccgctctgcgggctttggtggtggtgggccaggtttgagcttccaccactgtcttattccttcagagagagtgtcctcgagccaatctggaagataaccatcggcagccatacctgatttaaatcatttattgttcagagatgcagtcatccaaatccacattgaccagatcgcaggcagtgcaagcgtctggcacctttcccatgatatgatgaatgtagcacagtttctgatacgcctttttgacgacagaaacgggttgagattctgacacgggaaagcactctaaacagtctttctgtccgtgagtgaagcagatatttgaattctgattcattctctcgcattgtctgcagggaaacagcatcagattcatgcccacgtgacgagaacatttgttttggtacctgtccgcgtagttgatcgaagcttccgcgtctgacgtcgatggctgcgcaactgactcgcgcgcccgtttgggctcacttatatctgcgtcactgggggcgggtcttttcttagctccaccctttttgacgtagaattcatgctccacctcaaccacgtgatcctttgcccaccggaaaaagtctttcacttcctgcttggtgacctttccaaagtcatgatccagacggcgggtaagttcaaatttgaacatccggtcttgcaacggctgctggtgctcgaaggtcgttgagttcccgtcaatcacggcgcacatgttggtgttggaggtgacgatcacgggagtcgggtctatctgggccgaggacttgcatttctggtccacacgcaccttgcttcctccaagaatggctttggccgactccacgaccttggcggtcatcttcccctcctcccaccagatcaccatcttgtcgacgcaatggtaaaaggaaagttctcattgg

SEQ ID NO: 4799 - DNA, 2208 bp, Adeno-associated virus
atggctgccgatggttatcttccagattggctcgaggacactctctctgaaggaataagacagtggtggaagctcaaacctggcccaccaccaccaaagcccgcagagcggcataaggacgacagcaggggtcttgtgcttcctgggtacaagtacctcggacccttcaacggactcgacaagggggagccggtcaacgaggcagacgccgcggccctcgagcacgacaaggcctacgaccggcagctcgacagcggagacaacccgtacctcaagtacaaccacgccgacgcagagtttcaggagcgccttaaagaagatacgtcttttgggggcaacctcggacgagcagtcttccaggcgaaaaagagggttcttgaacctctgggcctggttgaggaacctgttaagacggctccgggaaaaaagaggccggtagagcactctcctgtggagccagactcctcctcgggaaccggaaaagcgggccagcagcctgcaagaaaaagattaaattttggtcagactggagacgcagactccgtacctgacccccagcctctcggacagccaccagcagccccctctggtctgggatctactacaatggctacaggcagtggcgcaccaatggcagacaataacgagggtgccgatggagtgggtaattcctcaggaaattggcattgcgattcccaatggctgggcgacagagtcatcaccaccagcacccgaacctgggccctgcccacatacaacaaccacctctacaagcaaatctccagccaatcaggagccagcaacgacaaccactactttggctacagcaccccctgggggtattttgacttcaacagattccactgccacttttcaccacgtgactggcaaagactcatcaacaacaactggggattccggcccaaaagactcaacttcaagctctttaatattcaagtcaaagaggtcacgcagaatggcggtacgacgacgattgccaataaccttaccagcacggttcaggtgtttactgactcggagtaccagctcccgtacgtcctgggctcggcgcatcaaggatgcctcccgccgtttccagcggacgtcttcatggtcccacagtatggatacctcaccctgaacaacgggagtcaggcggtaggacgctcttccttttactgcctggagtactttccttctcagatgctgcgtactggaaacaactttcagttcagctacacttttgaagacgtgcctttccacagcagctacgctcacagccagagtctggatcggctgatgaatcctctgatcgaccagtacctgtattatctgaacaagacacaaacaaatagtggaactcttcagcagtctcggctactgtttagccaagctggaccaaccaacatgtctcttcaagctaaaaactggctgcctggaccttgctacagacagcagcgtctgtcaaaacaggcaaacggcaacaacaacagcaactttccctggactgcagctacaaagtatcatctaaatggccgggactcgttggttaatccaggaccagctatggccagtcacaaggatgacgaagaaaagtttttccccatgcatggaaccctgatatttggtaaacaaggaacaaatgccaacgacgcggatttggaaaatgtcatgattacagatgaagaagaaatcagggccaccaatcccgtggctacggagcagtacgggactgtgtcaaataatttgcaaaactcaaacactggtccaactactggaactgtcaatcaccaaggagcgttacctggtatggtgtggcaggatcgagacgtgtacctgcagggacccatttgggccaagattcctcacaccgatggacactttcatccttctccactgacgggaggttttggactcaaacacccgcctcctcagatcatgatcaaaaacactcccgttccagccaatcctcccacaaacttcagttctgccaagtttgcttctttcatcacacagtattccacgggacaggtcagcgtggagatcgagtgggagctgcagaaggagaacagcaaacgctggaatcccgaaattcagtacacttccaactacaacaagtctgttaatgtggactttactgtggacactaatggtgtgtattcagagcctcgccccattggcaccagatacctgactcgtaatctgtaa

SEQ ID NO: 4800 - protein, 735 aa, Adeno-associated virus
MAADGYLPDWLEDTLSEGIRQWWKLKPGPPPPKPAERHKDDSRGLVLPGYKYLGPFNGLDKGEPVNEADAAALEHDKAYDRQLDSGDNPYLKYNHADAEFQERLKEDTSFGGNLGRAVFQAKKRVLEPLGLVEEPVKTAPGKKRPVEHSPVEPDSSSGTGKAGQQPARKRLNFGQTGDADSVPDPQPLGQPPAAPSGLGSTTMATGSGAPMADNNEGADGVGNSSGNWHCDSQWLGDRVITTSTRTWALPTYNNHLYKQISSQSGASNDNHYFGYSTPWGYFDFNRFHCHFSPRDWQRLINNNWGFRPKRLNFKLFNIQVKEVTQNGGTTTIANNLTSTVQVFTDSEYQLPYVLGSAHQGCLPPFPADVFMVPQYGYLTLNNGSQAVGRSSFYCLEYFPSQMLRTGNNFQFSYTFEDVPFHSSYAHSQSLDRLMNPLIDQYLYYLNKTQTNSGTLQQSRLLFSQAGPTNMSLQAKNWLPGPCYRQQRLSKQANGNNNSNFPWTAATKYHLNGRDSLVNPGPAMASHKDDEEKFFPMHGTLIFGKQGTNANDADLENVMITDEEEIRATNPVATEQYGTVSNNLQNSNTGPTTGTVNHQGALPGMVWQDRDVYLQGPIWAKIPHTDGHFHPSPLTGGFGLKHPPPQIMIKNTPVPANPPTNFSSAKFASFITQYSTGQVSVEIEWELQKENSKRWNPEIQYTSNYNKSVNVDFTVDTNGVYSEPRPIGTRYLTRNL

SEQ ID NO: 4801 - DNA, 2208 bp, Adeno-associated virus
atggctgccgatggttatcttccagattggctcgaggacactctctctgaaggaataagacagtggtggaagctcaaacctggcccaccaccaccaaagctcgcagagcggcatcaggacgacagcaggggtcttgtgcttcctgggtacaagtacctcggacccttcaacggactcgacaaaggagagccggtcaacgaggcagacgccgcggccctcgagcacgacaaggcctacgaccggcagctcgacagcggagacaacccgtacctcaagtacaaccacgccgacgcggagtttcaggagcgtcttaaagaagatacgtcttttgggggcaacctcggacgagcagtcttccaggcgaaaaagagggttcttgaacctctgggcctggttgaggaacctgttaagacggctccgggaaaaaagaggccggtagagcactctcctgtggagccagactcctcctcgggaaccggaaaggcgggccatcagcctgcgagaaagagattgaattttggtcagactggagacgcagactccgtacctgacccccagcctctcggacagccaccagcagcccccacaagtctgggatctactacaatggctacaggcagtggcgcaccaatggcagacaataacgagggtgccgatggagtgggtaattcctcaggaaattggcattgcgattcccaatggctgggcgacagagtcatcaccaccagcacccgaacctgggccctgcccacctacaacaaccacctctacaagcaaatctccagccaatcaggagcctcgaacgacaaccactactttggctacagcaccccctgggggtattttgacttcaacagattccactgtcacttctccccacgtgattggcaaagactcatcaacaacaactggggattccgacccaagagactcaacttcaagctctttaacattcaagtcaaagaggtcacgcagaatgacggtacgacgacgattgccaataaccttaccagcacggttcaggtgtttactgactcggagtaccagctcccgtacgtcctcggctcggcgcatcaaggatgcctcccgccgtttccagcggacgtcttcacggtcccacagtatggatacctcaccctgaacaacgggagtcaggcggtaggacgctcttccttttactgcctggagtactttccttctcagatgctgcgtactggaaacaaccttaccttcagctacacctttgaggacgttcctttccacagcagctacgctcacagccagagtttggaccggctgatgaatcctctgatcgaccagtatctatattatctgaacaggacacaatcaaatagtggaactcttcagcagtctaggctactgtttagccaagctggacccaccagcatgtctcttcaagctaaaaactggctgcctggaccttgctacagacagcagcgtctttcaaagcaggcaaacgacaacaacaacagcaactttccctggactgcggctacaaagtatcatctaaatggccgggactcgttggttaatccaggaccagctatggccagccacaaagacgatgaagaaaagtttttccccatgcatggaaccctgatatttggtaaacaaggaacaaatgctaacgacgcggatttggagcatgttatgattacagatgaagaagaaatcaggaccaccaatcctgtggctacagagcagtacggaaacgtgtcaaataatttgcaaaactcaaatactggtccaactacagaaaatgtcaatcaccagggagcgttacctggtatggtgtggcaggatcgagacgtgtacctgcagggacccatttgggccaagattcctcacaccgacggacactttcacccttctccactgatgggaggttttggactcaaacacccgcctcctcaaatcatgatcaaaaacactcccgttccagccaatcctcccacaaactacagttctgccaagtttgcttctttcatcacacagtattccacgggccaggtcagcgtggagattgagtgggagctgcggaaggagaacagcaaacgctggaaccccgagatccagtatacttccaactacaacaaatctgttaatgtggactttactgtggacactaatggtgtgtattcagagcctcgccccattggcaccagatacctgactcgtaatctgtaa

SEQ ID NO: 4802 - protein, 735 aa, Adeno-associated virus
MAADGYLPDWLEDTLSEGIRQWWKLKPGPPPPKLAERHQDDSRGLVLPGYKYLGPFNGLDKGEPVNEADAAALEHDKAYDRQLDSGDNPYLKYNHADAEFQERLKEDTSFGGNLGRAVFQAKKRVLEPLGLVEEPVKTAPGKKRPVEHSPVEPDSSSGTGKAGHQPARKRLNFGQTGDADSVPDPQPLGQPPAAPTSLGSTTMATGSGAPMADNNEGADGVGNSSGNWHCDSQWLGDRVITTSTRTWALPTYNNHLYKQISSQSGASNDNHYFGYSTPWGYFDFNRFHCHFSPRDWQRLINNNWGFRPKRLNFKLFNIQVKEVTQNDGTTTIANNLTSTVQVFTDSEYQLPYVLGSAHQGCLPPFPADVFTVPQYGYLTLNNGSQAVGRSSFYCLEYFPSQMLRTGNNLTFSYTFEDVPFHSSYAHSQSLDRLMNPLIDQYLYYLNRTQSNSGTLQQSRLLFSQAGPTSMSLQAKNWLPGPCYRQQRLSKQANDNNNSNFPWTAATKYHLNGRDSLVNPGPAMASHKDDEEKFFPMHGTLIFGKQGTNANDADLEHVMITDEEEIRTTNPVATEQYGNVSNNLQNSNTGPTTENVNHQGALPGMVWQDRDVYLQGPIWAKIPHTDGHFHPSPLMGGFGLKHPPPQIMIKNTPVPANPPTNYSSAKFASFITQYSTGQVSVEIEWELRKENSKRWNPEIQYTSNYNKSVNVDFTVDTNGVYSEPRPIGTRYLTRNL

SEQ ID NO: 4803 - DNA, 2208 bp, Adeno-associated virus
atggctgccgatggttatcttccagattggctcgaggacactctctctgaaggaataagacagtggtggaagctcaaacctggcccaccaccaccaaagcccgcagagcggcatcaggacgacagcaggggtcttgtgcttcctgggtacaagtacctcggacccttcaacggactcgacaaaggagagccggtcaacgaggcagacgccgcggccctcgagcacgacaaggcctacgaccggcagctcgacagcggagacaacccgtacctcaagtacaaccacgccgacgcggagtttcaggagcgtcttaaagaagatacgtcttttgggggcaacctcggacgagcagtcttccaggcgaaaaagagggttcttgaacctctgggcctggttgaggaacctgttaagacggctccgggaaaaaagaggccggtagagcactctcctgtggagccagactcctcctcgggaaccggaaaagcgggccatcagcctgcgagaaagagattgaattttggtcagactggagacgcagactccgtacctgacccccagcctctcggacagccaccagcagcccccacaagtttgggatctactacaatggctacaggcagtggcgcaccaatggcagacaataacgagggtgccgatggagtgggtaattcctcaggaaattggcattgcgattcccaatggctgggcgacagagtcatcaccaccagcacccgaacctgggccctgcccacctacaacaaccacctctacaagcaaatctccagccaatcaggagcctcgaacgacaaccactactttggctacagcaccccctgggggtattttgacttcaacagattccactgtcacttctccccacgtgattggcaaagactcatcaacaacaactggggattccgacccaagagactcaacttcaagctctttaacattcaagtcaaggaggtcacgcagaatgacggtacgacgacgattgccaataaccttaccagcacggttcaggtgtttactgactcggagtaccagctcccgtacgtcctcggctcggcgcatcaaggatgcctcccgccgtttccagcggacgtcttcatggtcccacagtatggatacctcaccctgaacaacgggagtcaggcggtaggacgctcttccttttactgcctggagtactttccttctcagatgctgcgtactggaaacaactttaccttcagctacacctttgaggacgttcctttccacagcagctacgctcacagccagagtttggaccggctgatgaatcctctgatcgaccagtatctatattatctgaacaggacacaatcaaatagtggaactcttcagcagtctaggctactgtttagccaagctggacccaccagcatgtctcttcaagctaaaaactggctgcctggaccttgctacagacagcagcgtctttcaaagcaggcaaacgacaacaacaacagcaactttccctggactgcggctacaaagtatcgtctaaatggccgggactcgttggttaatccaggaccagctatggccagccacaaagacgatgaagaaaagtttttccccatgcatggaaccctgatatttggtaaacaaggaacaaatgctaacgacgcggatttggagcatgttatgattacagatgaagaagaaatcaggaccaccaatcctgtggctacagagcagtacggaaacgtgtcaaataatttgcaaaactcaaatactggtccaactacagaaaatgtcaatcaccagggagcgttacctggtatggtgtggcaggatcgagacgtgtacctgcagggacccatttgggccaagattcctcacaccgacggacactttcacccttctccactgatgggaggttttggactcaaacacccgcctcctcaaatcatgatcaaaaacactcccgttccagccaatcctcccacaaacttcagttctgccaagtttgcttctttcatcacacagtattccacgggccaggtcagcgtggagattgagtgggagctgcagaaggagaacagcaaacgctggaaccccgagatccagtatacttccaactacaacaaatctgttaatgtggactttactgtggacactaatggtgtgtattcagagcctcgccccattggcaccagatacctgactcgtaatctgtaa

SEQ ID NO: 4804 - protein, 735 aa, Adeno-associated virus
MAADGYLPDWLEDTLSEGIRQWWKLKPGPPPPKPAERHQDDSRGLVLPGYKYLGPFNGLDKGEPVNEADAAALEHDKAYDRQLDSGDNPYLKYNHADAEFQERLKEDTSFGGNLGRAVFQAKKRVLEPLGLVEEPVKTAPGKKRPVEHSPVEPDSSSGTGKAGHQPARKRLNFGQTGDADSVPDPQPLGQPPAAPTSLGSTTMATGSGAPMADNNEGADGVGNSSGNWHCDSQWLGDRVITTSTRTWALPTYNNHLYKQISSQSGASNDNHYFGYSTPWGYFDFNRFHCHFSPRDWQRLINNNWGFRPKRLNFKLFNIQVKEVTQNDGTTTIANNLTSTVQVFTDSEYQLPYVLGSAHQGCLPPFPADVFMVPQYGYLTLNNGSQAVGRSSFYCLEYFPSQMLRTGNNFTFSYTFEDVPFHSSYAHSQSLDRLMNPLIDQYLYYLNRTQSNSGTLQQSRLLFSQAGPTSMSLQAKNWLPGPCYRQQRLSKQANDNNNSNFPWTAATKYRLNGRDSLVNPGPAMASHKDDEEKFFPMHGTLIFGKQGTNANDADLEHVMITDEEEIRTTNPVATEQYGNVSNNLQNSNTGPTTENVNHQGALPGMVWQDRDVYLQGPIWAKIPHTDGHFHPSPLMGGFGLKHPPPQIMIKNTPVPANPPTNFSSAKFASFITQYSTGQVSVEIEWELQKENSKRWNPEIQYTSNYNKSVNVDFTVDTNGVYSEPRPIGTRYLTRNL

SEQ ID NO: 4805 - DNA, 2208 bp, Adeno-associated virus
atggctgccgatggttatcttccagattggctcgaggacactctctctgaaggaataagacagtggtggaagctcaaacctggcccaccaccaccaaagcccgcagagcggcatcaggacgacagcaggggtcttgtgcttcctgggtacaagtacctcggacccttcaacggactcgacaaaggagagccggtcaacgaggcagacgccgcggccctcgagcacgacaaggcctacgaccggcagctcgacagcggagacaacccgtacctcaagtacaaccacgccgacgcggagtttcaggagcgtcttaaagaagatacgtcttttgggggcaacctcggacgagcagtcttccaggcgaaaaagagggttcttgaacctctgggcctggttgaggaacctgttaagacggctccgggaaaaaagaggccggtagagcactctcctgtggagccagactcctcctcgggaaccggaaaagcgggccatcagcctgcgagaaagagattgaattttggtcagactggagacgcagactccgtacctgacccccagcctctcggacagccaccagcagcccccacaagtttgggatctactacaatggctacaggcagtggcgcaccaatggcagacaataacgagggtgccgatggagtgggtaattcctcaggaaattggcattgcgattcccaatggctgggcgacagagtcatcaccaccagcacccgaacctgggccctgcccacctacaacaaccacctctacaagcaaatctccagccaatcaggagcctcgaacgacaaccactactttggctacagcaccccctgggggtattttgacttcaacagattccactgtcacttctccccacgtgattggcaaagactcatcaacaacaactggggattccgacccaagagactcaacttcaagctctttaacattcaagtcaaagaggtcacgcagaatgacggtacgacgacgattgccaataaccttaccagcacggttcaggtgtttactgactcggagtaccagctcccgtacgtcctcggctcggcgcatcaaggatgcctcccgccgtttccagcggacgtcttcatggtcccacagtatggatacctcaccctgaacaacgggagtcaggcggtaggacgcccttccttttactgcctggagtactttccttctcagatgctgcgtactggaaacaactttaccttcagctacacctttgaggacgttcctttccacagcagctacgctcacagccagagtttggaccggctgatgaatcctctgatcgaccagtatctatattatctgaacaggacacaatcaaatagtggaactcttcagcagtctaggctactgtttagccaagctggacccaccagcatgtctcttcaagctaaaaactggctgcctggaccttgctacagacagcagcgtctttcaaagcaggcaaacgacaacaacaacagcaactttccctggactgcggctacaaagtatcatctaaatggccgggactcgttggttaatccaggaccagctatggccagccacaaagacgatgaagaaaagtttttccccatgcatgggaccctgatatttggtaaacaaggaacaaatgctaacgacgcggatttggagcatgttatgattacagatgaagaagaaatcaggaccaccaatcctgtggctacagagcagtacggaaacgtgtcaaataatttgcaaaactcaaatactggtccaactacagaaaatgtcaatcaccagggagcgttacctggtatggtgtggcaggatcgagacgtgtacctgcagggacccatttgggccaagattcctcacaccgacggacactttcacccttctccactgatgggaggttttggactcaaacacccgcctcctcaaatcatgatcaaaaacactcccgttccagccaatcctcccacaaacttcagttctgccaagtttgcttctttcatcacacagtattccacgggccaggtcagcgtggagattgagtgggagctgcagaaggagaacagcaaacgctggaaccccgagatccagtatacttccaactacaacaaatctgttaatgtggactttactgtggacactaatggtgtgtattcagagcctcgccccattggcaccagatacctgactcgtaatctgtaa

SEQ ID NO: 4806 - protein, 735 aa, Adeno-associated virus
MAADGYLPDWLEDTLSEGIRQWWKLKPGPPPPKPAERHQDDSRGLVLPGYKYLGPFNGLDKGEPVNEADAAALEHDKAYDRQLDSGDNPYLKYNHADAEFQERLKEDTSFGGNLGRAVFQAKKRVLEPLGLVEEPVKTAPGKKRPVEHSPVEPDSSSGTGKAGHQPARKRLNFGQTGDADSVPDPQPLGQPPAAPTSLGSTTMATGSGAPMADNNEGADGVGNSSGNWHCDSQWLGDRVITTSTRTWALPTYNNHLYKQISSQSGASNDNHYFGYSTPWGYFDFNRFHCHFSPRDWQRLINNNWGFRPKRLNFKLFNIQVKEVTQNDGTTTIANNLTSTVQVFTDSEYQLPYVLGSAHQGCLPPFPADVFMVPQYGYLTLNNGSQAVGRPSFYCLEYFPSQMLRTGNNFTFSYTFEDVPFHSSYAHSQSLDRLMNPLIDQYLYYLNRTQSNSGTLQQSRLLFSQAGPTSMSLQAKNWLPGPCYRQQRLSKQANDNNNSNFPWTAATKYHLNGRDSLVNPGPAMASHKDDEEKFFPMHGTLIFGKQGTNANDADLEHVMITDEEEIRTTNPVATEQYGNVSNNLQNSNTGPTTENVNHQGALPGMVWQDRDVYLQGPIWAKIPHTDGHFHPSPLMGGFGLKHPPPQIMIKNTPVPANPPTNFSSAKFASFITQYSTGQVSVEIEWELQKENSKRWNPEIQYTSNYNKSVNVDFTVDTNGVYSEPRPIGTRYLTRNL

SEQ ID NO: 4807 - DNA, 2208 bp, Adeno-associated virus
atggctgccgatggttatcttccagattggctcgaggacactctctctgaaggaataagacagtggtggaagctcaaacctggcccaccaccaccaaagcccgcagagcggcataaggacgacagcaggggtcttgtgcttcctgggtacaagtacctcggacccttcaacggactcgacaagggagagccggtcaacgaggcagacgccgcggccctcgagcacgacaaggcctacgaccggcagctcgacagcggagacaacccgtacctcaagtacaaccacgccgacgcggagtttcaggagcgccttaaagaagatacgtcttttgggggcaacctcggacgagcagtcttccaggcaaaaaagagggttcttgaacctctgggcctggttgaggagcctgttaaaacggctccgggaaaaaagaggccggtagagcactctcctgcggagccagactcctcctcgggaaccggaaaagcgggccagcagcctgcaagaaaaagattgaatttcggtcagactggagacgcagactccgtacctgacccccagcctctcggacagccaccagcagccccctctggtctgggaactaatacgatggcttcaggcagtggcgcaccaatggcagacaataacgagggcgccgacggagtgggtaattcctcgggaaattggcattgcgattccacatggatgggcgacagagtcatcaccaccagcacccgaacttgggccctgcccacctacaacaaccatctctacaagcaaatctccagccaatcaggagccagcaacgacaaccactactttggctacagcaccccttgggggtattttgacttcaacagattccactgccacttttcaccacgtgactggcaaagactcatcaacaacaactggggattccggcccaagagactcaacttcaagctctttaacattcaagtcaaagaggtcacgcagaatgacggtacgacgacgattgccaataaccttaccagcacggttcaggtgtttactgactcggagtaccagctcccgtacgtcctcggctcggcgcatcaaggatgcctcccgccgttcccagcagacgtcttcatggtgccacagtatggatacctcaccctgaacaacgggagtcaggcagtaggacgctcttcattttactgcctggagtactttccttctcagatgctgcgtaccggaaacaactttaccttcagctacacctttgaggacgttcctttccacagcagctacgctcacagccagagtttggaccgtctcatgaatcctctcatcgaccagtacctgtattacttgagcagaacaaacactccaagcggaaccaccacgcagtccaggcttcagttttctcaggccggagcaagtgacattcgggaccagtctaggaactggcttcctggaccctgttaccgccagcagcgagtatcaaagacatctgcggataacaacaacagtgaatactcgtggactggagctaccaagtaccacctcaatggcagagactctctggtgaatccgggcccggccatggccagccacaaggacgatgaagaaaagttttttcctcagagcggggttctcatctttgggaagcaaggctcagagaaaacaaatgtggacattgaaaaggtcatgattacagacgaagaggaaatcaggaccaccaatcccgtggctacggagcagtatggttctgtatctaccaacctgcagggcggcaacacacaagcagctaccgcagatgtcaacacacaaggcgttcttccaggcatggtctggcaggacagagacgtgtacctgcaggggcccatctgggcaaagattccacacacggacggacattttcacccctctcccctcatgggcggattcggacttaaacaccctcctccacagattctcatcaagaacaccccggtacctgcgaatccttcgaccaccttcagtgcggcaaagtttgcttctttcatcacacagtattccacggggcaggtcagcgtggagatcgagtgggagctgcagaaggagaacagcaaacgctggaatcccgagatccagtacacttccaactacaacaaatctgttaatgtggactttactgttgacactaatggcgtgtattcagagcctcgccccattggcaccagatacctgactcgtaatctgtaa

SEQ ID NO: 4808 - protein, 735 aa, Adeno-associated virus
MAADGYLPDWLEDTLSEGIRQWWKLKPGPPPPKPAERHKDDSRGLVLPGYKYLGPFNGLDKGEPVNEADAAALEHDKAYDRQLDSGDNPYLKYNHADAEFQERLKEDTSFGGNLGRAVFQAKKRVLEPLGLVEEPVKTAPGKKRPVEHSPAEPDSSSGTGKAGQQPARKRLNFGQTGDADSVPDPQPLGQPPAAPSGLGTNTMASGSGAPMADNNEGADGVGNSSGNWHCDSTWMGDRVITTSTRTWALPTYNNHLYKQISSQSGASNDNHYFGYSTPWGYFDFNRFHCHFSPRDWQRLINNNWGFRPKRLNFKLFNIQVKEVTQNDGTTTIANNLTSTVQVFTDSEYQLPYVLGSAHQGCLPPFPADVFMVPQYGYLTLNNGSQAVGRSSFYCLEYFPSQMLRTGNNFTFSYTFEDVPFHSSYAHSQSLDRLMNPLIDQYLYYLSRTNTPSGTTTQSRLQFSQAGASDIRDQSRNWLPGPCYRQQRVSKTSADNNNSEYSWTGATKYHLNGRDSLVNPGPAMASHKDDEEKFFPQSGVLIFGKQGSEKTNVDIEKVMITDEEEIRTTNPVATEQYGSVSTNLQGGNTQAATADVNTQGVLPGMVWQDRDVYLQGPIWAKIPHTDGHFHPSPLMGGFGLKHPPPQILIKNTPVPANPSTTFSAAKFASFITQYSTGQVSVEIEWELQKENSKRWNPEIQYTSNYNKSVNVDFTVDTNGVYSEPRPIGTRYLTRNL

SEQ ID NO: 4809 - DNA, 3161 bp, Adeno-associated virus
gattgaatttagcggccgcgaattcgcccttgctgcgtcaactggaccaatgagaactttccattcaatgattgcgtcgacaagatggtgatctggtgggaggagggaaagatgaccgccaaggtcatggagtcggccaaagccattctcggaggaagcaaggtgcgcgtggaccagaaatgtaagtcctcggcccagatagacccgactcccgtgattgtcacctccaacaccaacatgtgcgccgtgattgacgggaactcaacgaccttcgagcaccagcagccgttgcaagaccggatgttcaaatttgaactcacccgccgtctggatcatgactttgggaaggtcaccaagcaggaagtcaaagactttttccggtgggcaaaggatcacgtggttgaggtggagcatgaattctacgtcaaaaagggtggagccaagaaaagacccgcccccagtgacgcagatataagtgagcccaaacgggcgcgcgggtcagttgcgcagccatcgacgtcagacgcggaagcttcgatcaactacgcggacaggtaccaaaacaaatgttctcgtcacgtgggcatgaatctgatgctgtttccctgcagacaatgcgagagaatgaatcaaaattcaaatatctgcttcactcacggacagaaggactgtttagagtgctttcccgtgtcagaatctcaacccgtttctgtcgtcaaaaaggcgtatcagaaactttgctacattcatcatatcatgggaaaggtgccagacgcttgcactgcctgcgatctggtcaatgtggatttggatgactgcatctctgaacaataaatgatttaaatcaggtatggctgccgatggttatcttccagattggctcaaggacactctctctgaaggaataagacagtggtggaagctcaaacctggcccaccaccaccaaagcccgcagagcggcataaggacgacagcgggggtcttgtgcttcctgggtacaagtacctcggacccttcaacggactcgacaagggagagccggtcaacgaggcagacgccgcggccctcgagtacgacaaggcctacgaccggcagctcgacagcggagacaacccgtacctcaagtacaaccacgccgacgcggagtttcaggagcgccttaaagaagatacgtcttttgggggcaacctcggacgagcagtcttccaggcgaaaaagagggttcttgaacctctgggcctggttgaggaacctgttaagacggctccgggaaaaaagaggccggtagagcactctcctgtggagccagactcctcctcgggaacaggaaaagcgggccagcagcctgcgagaaagagattgaattttggtcagactggagacgcagactccgtacctgacccccagcctctcggacagccaccagcagccccctctggtctgggaactaatacgatggctacaggcagtggcgcaccaatggcagacaataacgagggcgccgacggagtgggtaattcctcgggaagttggcattgcgattccacatggatgggcgacagagtcatcaccaccagcacccgaacctgggctctgcccacctacaacaaccatctgtacaagcagatctccagccaatcaggagccagcaacgacaaccactactttggctacagcaccccttgggggtattttgacttcaacagattccactgccacttttcaccacgtgactggcaaagactcatcaacaacaactggggattccggcccaagagactcaacttcaagctctttaacattcaagtcaaggaggtcacgcagaatgacggtacgacgacgattgccaataaccttaccagcacggttcaggtgtttactgactcggagtaccagctcccgtacgtccccggctcggcgcatcaaggatgcctcccgccgttcccagcagacgtcttcatggtgccacagtatggatacctcaccctgaacaacgggagtcaggcagtaggacgctcttcattttactgcctggagtactttccttctcagatgcttcgtaccggaaacaactttaccttcagctacacctttgaggatgttcctttccacagcagctacgctcacagccagagtttggaccgtctcatgaatcctctcatcgaccagtacctgtattacttgagcagaacaaacactccaagcggaaccaccacgcagtccaggcttcagttttctcaggccggagcaagtgacattcgggaccagtctaggaactggcttcctggaccctgttaccgccagcagcgagtatcaaagacagctgcggacaacaacaacagtgaatactcgtggactggagctaccaagtaccacctcaatggcagagactctctggtgaatccgggcccggccatggccagccacaaggacgatgaagaaaagttttttcctcaaagcggggttctcatctttgggaagcaaggctcagagaaaacaaatgtggacattgaaaaggtcatgattacagacgaagaggaaatcagaaccaccaatcccgtggccacggagcagtatggttctgtatctaccaacctccagagcggcaacacacaagcagctactgcagatgtcaacacacaaggcgttcttccaggcatggtctggcaggacagagacgtgcacctgcaggggcctatctgggcaaagattccacacacggacggacattttcacccctctcccctcatgggcggatttggacttaaacaccctcctccacagattctcatcaagaacaccccggtacctgcaaatccttcgaccaccttcagtgcggcaaagtttgcttccttcatcacacagtattccacagggcaggtcagcgtggagatcgagtgggagctgcagaaggagaacagcaaacgctggaaccccgagatccagtacacttccaactacaacaaatctgttaatgtggactttactgtggacactaatggtgtgtattcagagcctcgccccattggcaccagatacctgactcgtaatctgtaattgcttgttaatcaataaaccgtttaattcgtttcagttgaactttggtctctgcgaagggcgaattcgtttaaaccctgcaggactagtccctttagtgagg

SEQ ID NO: 4810 - DNA, 3162 bp, Adeno-associated virus
gaattgaatttagcggccgcgaattcgcccttcgcagagaccaaagttcaactgaaacgaattaaacggtttattgattaacaagcaattacagattacgagtcaggtatctggtgccaatggggcgaggctctgaatacacgccattagtgtccacagtaaagtccacattaacagacttgttgtagttggaagtgtactgaatttcgggattccagcgtttgctgttttccttctgcagctcccactcgatctccacgctgacctgtcccgtggagtactgtgtgatgaaggaagcaaactttgccgcactgaaggtggtcgaaggattcgcaggtaccggggtgttcttgatgagaatctgtggaggagggtgtttaagtccgaatccacccatgaggggagaggggtgaaaatgtccgtccgtgtgtggaatctttgcccagatgggcccctgaaggtacacatctctgtcctgccagaccatgcctggaagaacgccttgtgtgttgacatctgcggtagctgcttgtctgttgcctctctggaggttggtagatacagaaccgtactgctccgtagccacgggattggttgtcctgatttcctcttcgtctgtaatcatgaccttttcaatgtccacatttgttttctctgagccttgcttcccaaagatgagaaccccgctctgaggaaaaaacttttcttcattgtccttgtggcttgccatggccgggcccggattcaccagagagtctctgccattgaggtggtacttggtagctccagtccacgagtattcactgttgttgttatccgcagatgtctttgatactcgctgctggcggtaacagggtccaggaagccagttcctagactggtcccgaatgtcactcgctccggcctgagaaaactgaagccttgactgcgtggtggttccacttggagtgtttgttgtgctcaagtaatacaggtactggtcgatgagaggattcatgagacggtccagactctggctgtgagcgtagccgctgtggaaaggaacgtcctcaaaagtgtagctgaaggtaaagttgtttccggtacgcagcatctgagaaggaaagtactccaggcagtaaaatgaagagcgtcctactgcctgactcccgttgttcagggtgaggtatccatactgtggcaccatgaagacgtctgctgggaacggcgggaggcatccttgatgcgccgagccgaggacgtacgggagctggtactccgagtcagtaaacacctgaaccgtgctggtaaggttattggcaatcgtcgtcgtaccgtcattctgcgtgacctctttgacttgaatgttaaagagcttgaagttgagtctcttgggtcggaatccccagttgttgttgatgagtctttgccagtcacgtggtgaaaagtggcagtggaatctgttgaagtcaaaatacccccaaggggtgctgtagccaaagtagtgattgtcgttcgaggctcctgattggctggaaatttgtttgtagaggtggttgttgtaggtgggcagggcccaggttcgggtgctggtggtgatgactctgtcgcccatccatgtggaatcgcaatgccaatttcccgaggaattacccactccgtcggcgccctcgttattgtctgccattggtgcgccactgcctgtagccatcgtattagttcccagaccagagggggctgctggtggctgtccgagaggctgggggtcaggtactgagtctgcgtctccagtctgaccaaaattcaatctttttcttgcaggctgctggcccgcctttccggttcccgaggaggagtctggctccacaggagagtgctctaccggcctcttttttcctggagccgtcttgacaggttccccaaccaggcccagaggttcaagaaccctctttttcgcctggaagactgctcgtccgaggttgcccccaaaagacgtatcttctttaaggcgctcctgaaactccgcgtcggcgtggttgtacttgaggtacgggttgtctccgctgtcgagctgccggtcgtaggctttgtcgtgctcgagggccgcggcgtctgcctcgttgaccggctctcccttgtcgagtccgttgaagggtccgaggtacttgtacccaggaagcacaagacccctgctgtcgtccttatgccgctctgcgggctttggtggtggtgggccaggtttgagcttccaccactgtcttattccttcagagagagtgtcctcgagccaatctggaagataaccatcggcagccatacctgatttaaatcatttattgttcaaagatgcagtcatccaaatccacattgaccagatcgcaggcagtgcaagcgtctggcacctttcccatgatatgatgaatgtagcacagtttctgatacgcctttttgacgacagaaacgggttgagattctgacacgggaaagcactctaaacagtctttctgtccgtgagtgaagcagatatttgaattctgattcattctctcgcattgtctgcagggaaacagcatcagattcatgcccacgtgacgagaacatttgttttggtacctgtctgcgtagttgatcgaagcttccgcgtctgacgtcgatggctgcgcaactgactcgcgcacccgtttgggctcacttatatctgcgtcactgggggcgggtcttttcttggctccaccctttttgacgtagaattcatgctccacctcaaccacgtgatcctttgcccaccggaaaaagtctttgacttcctgcttggtgaccttcccaaagtcatgatccagacggcgggtgagttcaaatttgaacatccggtcttgcaacggctgctggtgttcgaaggtcgttgagttcccgtcaatcacggcgcacatgttggtgttggaggtgacgatcacgggagtcgggtctatctgggccgaggacttgcatttctggtccacgcgcaccttgcttcctccgagaatggctttggccgactccacgaccttggcggtcatcttcccctcctcccaccagatcaccatcttgtcgacacagtcgttgaagggaaagttctcattggtccagttgacgcagcaagggcgaattcgtttaaacctgcaggactagtccctttagtgaggg

SEQ ID NO: 4811 - DNA, 3164 bp, Adeno-associated virus
gcgaattgaatttagcggccgcgaattcgcccttcgcagagaccaaagttcaactgaaacgaattaaacggtttattgattaacaagcaattacaaattacgagtcaggtatctggtgccaatggggcgaggctctgaatacacgccattagtgtccacagtaaagtccacattaacagacttgttgtagttggaagtgtactgaatttcgggattccagcgtttgctgttttccttctgcagctcccactcgatctccacgctgacctgtcccgtggagtactgtgtgatgaaggaagcaaactttgccgcactgaaggtggtcgaaggattcgcaggtaccggggtgttcttgatgagaatctgtggaggagggtgtttaggtccgaatccacccatgaggggagaggggtgaaaatgtccgtccgtgtgtggaatctttgcccagatgggcccctgaaggtacacatctctgtcctgccagaccatgcctggaagaacgccttgtgtgttgacatctgcggtagctgcttgtctgttgcctctctggaggttggtagatacagaaccatactgctccgtagccacgggattggttgtcctgatttcctcttcgtctgtaatcatgaccttttcaatgtccacatttgttttctctgagccttgcttcccaaagatgagaaccccgctctgaggaaaaaacttttcttcattgtccttgtggcttgccatggccgggcccggattcaccagagagtctctgccattgaggtggtacttggtagctccagtccacgagtattcactgttgttgttatccgcagatgtctttgatactcgctgctggcggtaacagggtccaggaagccagttcctagactggtcccgaatgtcactcgctccggcctgagaaaactgaagccttgactgcgtggtggttccacttggagtgtttgttgtgctcaagtaatacaggtactggtcgatgagaggattcatgagacggtccagactctggctgtgagcgtagctgctgtggaaaggaacgtcctcaaaagtgtagctgaaggtaaagttgtttccggtacgcagcatctgagaaggaaagtactccgggcagtaaaatgaagagcgtcctactgcctgactcccgttgctcagggtgaggtatccatactgtggcaccatgaagacgtctgctgggaacggcgggaggcatccttgatgcgccgagccgaggacgtacgggagctggtactccgagtcagtaaacacctgaaccgtgctggtaaggttattggcaatcgtcgtcgtaccgtcattctgcgtgacctctttgacttgaatgttaaagagcttgaagttgagtctcttgggtcggaatccccagttgttgttgatgagtctttgccagtcacgtggtgaaaagtggcagtggaatctgttgaagtcaaaatacccccaaggggtgctgtagccaaagtagtgattgtcgttcgaggctcctgattggctggaaatttgtctgtagaggtggttgttgtaggtgggcagggcccaggttcgggtgctggtggtgatgactctgtcgcccatccatgtggaatcgcaatgccgatttcccgaggaattacccactccgtcggcgccctcgttattgtctgccattggtgcgccactgcctgtagccatcgtattagttcccagaccagagggggctgctggtggctgtccgagaggctgggggtcaggtactgagtctgcgtctccagtctgaccaaaattcaatctttttcttgcaggctgctggcccgcctttccggttcccgaggaggagtctggctccacaggagagtgctctaccggcctcttttttcccggagccgtcttaacaggttccccaaccaggcccagaggttcaagaaccctctttttcgcctggaagactgctcgtccgaggttgcccccaaaagacgtatcttctttaaggcgctcctgaaactccgcgtcggcgtggttgtacttgaggtacgggttgtctccgctgtcgagctgccggtcgtaggctttgtcgtgctcgagggccgcggcgtctgcctcgttgaccggctctcccttgtcgagtccgttgaagggtccgaggtacttgtacccaggaagcacaagacccctgctgtcgtccttatgccgctctgcgggctttggtggtggtgggccaggtttgagcttccaccactgtcttattccttcagagagagtgtcctcgagccaatctggaagataaccatcggcagccatacctgatttaaatcatttattgttcaaagatgcagtcatccaaatccacattgaccagatcgcaggcagtgcaagcgtctggcacctttcccatgatatgatgaatgtagcacagtttctgatacgcctttttgacgacagaaacgggttgagattctgacacgggaaagcactctaaacagtctttctgtccgtgagtgaagcagatatttgaattctgattcattctctcgcattgtctgcagggaaacagcatcagattcatgcccacgtgacgagaacatttgttttggtacctgtctgcgtagttgatcgaagcttccgcgtctgacgtcgatggctgcgcaactgactcgcgcacccgtttgggcccacttatatctgcgtcactgggggcgggtcttttcttggctccaccctttttgacgtagaattcatgctccacctcaaccacgtgatcctttgcccaccggaaaaagtctttgacttcctgcttggtgaccttcccaaagtcatgatccagacggcgggtgagttcaaatttgaacatccggtcttgcaacggctgctggtgttcgaaggtcgttgagttcccgtcaatcacggcgcacatgttggtgttggaggtgacgatcacgggagtcgggtctatctgggccgaggacttgcatttctggtccacgcgcaccttgcttcctccgagaatggctttggccgactccacgaccttggcggtcatcttcccctcctcccaccagatcaccatcttgtcgacacagtcgttgaagggaaagttctcattggtccagttgacgcagcaagggcgaattcgtttaaacctgcaggactagtccctttagtgaggg

SEQ ID NO: 4812 - DNA, 3163 bp, Adeno-associated virus
accctcactaaagggactagtcctgcaggtttaaacgaattcgcccttgctgcgtcaactggagcaatgagaactttcccttcaacgactgtgtcgacaagatggtgatttggtgggaggaggggaagatgaccgccaaggtcgtggagtcggccaaagccattctcggaggaagcaaggtgcgcgtggaccagaaatgcaagtcctcggcccagatagatccgactcccgtgatcgtcacctccaacaccaacatgtgcgccgtgattgacgggaactcaacgaccttcgaacaccagcagccgttgcaagaccggatgttcaaatttgaactcacccgccgtctggatcatgactttgggaaggtcaccaagcaggaagtcaaagactttttccggtgggcaaaggatcacgtggttgaggtggagcatggattctacgtcaaaaagggtggagccaagaaaagacccgcccctagtgacgcagatataagtgagcccaaacgggtgcgcgagtcagttgcgcagccatcgacgtcggacgcggaagcttcgatcaactacgcggacaggtaccaaaacaaatgttctcgtcacgtgggcatgaatctgatgctgtttccctgcagacaatgcgagagaatgaatcaaaattcaaatatctgcttcactcacggacagaaagactgtttagagtgctttcccgtgtcagaatctcaacctgtttctgtcgtcaaaaaggcgtatcagaaactgcgctacattcatcatatcatgggaaaggtgccagacgcttgcactgcctgcgatctggtcaatgtggatttggatgactgcatctctgaacaataaatgatttaaatcaggtatggctgccgatggttatcttccagattggctcgaggacactctctctgaaggaataagacagtggtggaagctcaaacctggcccaccaccaccaaagcccgcagagcggcataaggacgacagcaggggtcttgtgcttcctgggtacaagtacctcggacccttcaacggactcgacaagggagagccggtcaacgaggcagacgccgcggccctcgagcacgacaaggcctacgaccggcagctcgacagcggagacaacccgtacctcaagtacaaccacgccgacgcggagtttcaggagcgtcttaaagaagatacgtcttttgggggcaacctcggacgagcagtcttccaggcgaaaaagagggttcttgaacctctgggcctggttgaggaacctgttaagacggctccgggaaaaaagaggccggtagagcactctcctgcggagccagactcctcctcgggaaccggaaaagcgggccagcagcctgcaagaaaaagactgaatttcggtcagactggagacgcagactccgtacctgacccccagcctctcggacagccaccagcagcccccacaagtttgggatctactacaatggctacaggcagtggcgcaccaatggcagacaataacgagggtgccgatggagtgggtaattcctcaggaaattggcattgcgattcccaatggctgggcgacagagtcatcaccaccagcacccgaacctgggccctgcccacctacaacaaccacctttacaagcaaatctccagccaatcaggagcctcaaacgacaaccactactttggctacagcaccccctgggggtattttgacttcaacagattccactgccacttttcaccacgtgactggcaaagactcatcaacaacaactggggattccgacccaagagactcaacttcaagctctttaacattcaagtcaaagaggtcacgcagaatgacggtacgacgacgattgccaataaccttaccagcacggttcaggtgtttactgactcggagtaccagctcccgtacgtcctcggctcggcgcatcaaggatgcctcccgccgtttccagcggacgtcttcatggtcccacagtatggatacctcaccctgaacaacgggagtcaggcggtaggacgctcttccttttactgcctggagtgctttccttctcagatgctgcgtactggaaacaactttcagttcagctacacttttgaagacgtgcctttccacagcagctacgctcacagccagagtttggatcggctgatgaatcctctgatcgaccagtacctgtattatctaaacagaacacaaacagctagtggaactcagcagtctcggctactgtttagccaagctggacccacaagcatgtctcttcaagctaaaaactggctgcctggaccgtgttatcgccagcagcgtttgtcaaagcaggcaaacgacaacaacaacagcaactttccctggactggagctaccaagtaccacctcaatggcagagactctttggtgaacccgggcccggccatggccagccacaaggacgatgaagaaaagtttttccccatgcatggaaccctaatatttggtaaagaaggaacaaatgctaccaacgcggaattggaaaatgtcatgattacagatgaagaggaaatcaggaccaccaatcccgtggctacagagcagtacggatatgtgtcaaataatttgcaaaactcaaatactgctgcaagtactgaaactgtgaatcaccaaggagcattacctggtatggtgtggcaggatcgagacgtgtacctgcagggacccatttgggccaagattcctcacaccgatggacactttcatccttctccactgatgggaggttttggactcaaacacccgcctcctcagattatgatcaaaaacactcccgttccagccaatcctcccacaaacttcagttctgccaagtttgcttccttcatcacacagtattccacgggacaggtcagcgtggagatcgagtgggagctgcagaaggagaacagcaaacgctggaatcccgaaattcagtacacttccaactacaacaaatctgttaatgtggactttactgtggacactaatggtgtgtattcagagcctcgccccattggcaccagatacctgactcgtaatctgtaattgcttgttaatcaataaaccgtttaattcgtttcagttgaactttggtctctgcgaagggcgaattcgcggccgctaaattcaattcgcc

SEQ ID NO: 4813 - protein, 735 aa, Adeno-associated virus
MAADGYLPDWLEDTLSEGIRQWWKLKPGPPPPKPAERHKDDSRGLVLPGYKYLGPFNGLYKGEPVDEADAAALEHDKAYDRQLDSGDNPYLKYNHADAEFQERLKEDTSFGGNLGRAVFQAKKRVLEPLGLVGEPVKTAPGKKRPVEHSPVEPDSSSGTGKAGNQPARKRLNFGQTGDADSVPDPQPLGQPPAAPSGLGSTTMATGSGAPVADNNEGADGVGNSSGNWHCDSQWLGDRVITTSTRTWALPTYNNHLYKQISSQSGASNDNHYFGYSTPWGYFDFNRFHCHFSPRDRQRLINNNWGFRPKRLNFKLFNIQVKEVTQNDGTTTIANNLTSTVQVFTDSGYQLPYVLGLAHQGCLPPFPADVFMVPQYGYLTLNNGSQAVGRSSFYCLEYFPSQMLRTGNNFQFSYTFEDVPFHSSYAHSQSLDRLMNPLIDQYLYYLNKTQSNSGTLQQSRLLFSQAGPTSMSLQAKNWLPGPCYRQQRLSKQANDNNNSNFPWTAATKYHLNGRDSLVNPGPAMASHKDDEEKFFPMHGTLIFGKQGTNANDADLDNVMITDEEEIRTTNPVATEQYGYVSNNLQNSNTGPTTGTVNHQGALPGMVWQDRDVYLQGPIWAKIPHTDGHFHPSPLMGGFGLKHPPPQIMIKNTPVPANPPTNFSSAKFASFITQYSTGQVSVEIEWELQKEDSKRWNPEIQYTSNYNKPVNVDFTVDTNGVYSEPRPIGTRYLTRNL

SEQ ID NO: 4814 - DNA, 2208 bp, Adeno-associated virus
atggctgccgatggttatcttccagattggctcgaggacactctctctgaaggaataagacagtggtggaagctcaaacctggcccaccaccaccaaagcccgcagagcggcataaggacgacagcaggggtcttgtgcttcctgggtacaagtacctcggacccttcaacggactctacaagggagagccggtcgacgaggcagacgccgcggccctcgagcacgacaaggcctacgaccggcagctcgacagcggagacaacccgtacctcaagtacaaccacgccgacgcggagtttcaggagcgccttaaagaagatacgtcttttgggggcaacctcggacgagcagtcttccaggccaaaaagagggttcttgaacctctgggcttggttggggagcctgttaaaacggctccgggaaaaaagaggccggtagagcactctcctgtggagccagactcctcctcgggaaccggaaaagcgggcaaccagcctgcaagaaaaagattgaattttggtcagactggagacgcagactccgtacctgacccccagcctctcggacagccaccagcagccccctctggtctgggatctactacaatggctacaggcagtggcgcaccagtggcagacaataacgagggtgccgatggagtgggtaattcctcaggaaattggcattgcgattcccaatggctgggcgacagagtcatcaccaccagcacccgaacctgggctctgcccacctacaataaccacctctacaagcaaatctccagccaatcaggagcctcaaacgacaaccactactttggctacagcaccccctgggggtattttgacttcaacagattccactgccacttttcaccacgtgaccggcaaagactcatcaacaacaactggggattccgaccaaaaagactcaacttcaagctctttaacattcaagtcaaagaggtcacgcagaatgacggtacgacgacgattgccaataaccttaccagcacggttcaggtgtttactgactcggggtaccagctcccgtacgtcctcggcttggcgcatcaaggatgcctcccgccgttcccagcagacgtcttcatggtgccacagtatggatacctcaccctgaacaacgggagtcaggcggtaggacgctcttccttttactgcctggagtactttccttctcagatgctgcgtactggaaacaactttcagttcagctacacctttgaagacgttcctttccacagcagctacgctcacagccagagtctggatcggctgatgaatcctctgatcgaccagtacctgtattatctgaacaagacacaatcaaatagtggaactcttcagcagtctcggctactgtttagccaagctggacccaccagcatgtctcttcaagctaaaaactggctgcctggaccttgctacagacagcagcgtctgtcaaagcaggcaaacgacaacaacaacagcaactttccctggactgcggctacaaagtatcatctaaatggccgggactcgttggttaatccaggaccagctatggccagccacaaagacgatgaagaaaagtttttccccatgcatggaaccctgatatttggtaaacaaggaacaaatgctaacgacgcggatttggacaatgtcatgattacagatgaagaagaaatccgcaccaccaatcccgtggctacggagcagtacggatatgtgtcaaataatttgcaaaactcaaatactggtccaactactggaactgtcaatcaccaaggagcgttacctggtatggtgtggcaggatcgagacgtgtacctgcagggacccatttgggccaagattcctcacaccgatggacactttcatccttctccacttatgggaggttttggactcaaacacccacctcctcagatcatgattaaaaacactcccgttccagccaatcctcccacaaacttcagttctgccaagtttgcttctttcatcacacagtattccacgggacaagtcagcgtggagatcgagtgggagctgcagaaggaggacagcaaacgctggaaccccgagatccagtacacttccaactataacaaacctgttaatgtggactttactgtggacactaatggtgtgtattcagagcctcgccccattggcaccagatacctgactcgtaatctgtaa

SEQ ID NO: 4815 - DNA, 3161 bp, Adeno-associated virus
cgaattgatttagcggccgcgaattcgcccttcgcagagaccaaagttcaactgaaacgaattaaacggtttattgattaacaagcaattacagattacgagtcaggtatctggtgccaatggggcgaggctctgaatacacaccattagtgtccacagtaaagtccacattaacagatttgttgtagttggaagtgtactggatctcgggattccagcgtttgctgttctccttctgtagctcccactcgatctccacgctgacccgccccgtggaatactgtgtgatgaaggaagcaaactttgccgcactgaaggtggtcgaaggattcgcaggtaccggggtgtttttgatgagaatctgtggaggagggtgtttaagtccgaatccgcccatgaggggagaggggtgaaaatgtccgtccgtgtgcggaatctttgcccagataggcccctgcaggtacacgtctctgtcctgccagaccatgcctggaagaacgccttgtgtgttgacatctgcagtagatgcttgtgtgttgccgctctggaggttggtagatacagaaccatactgctccgtggccacgggattggtggttctgatttcctcttcgtctgtaatcatgaccttttcaatgtccacatttgttttctctgatccttgttttccaaagatgagaaccccgctctgaggaaaaaacttttcttcatcgtccttgtggctggccattgccgggcccggattcaccagagagtctctgccattgaggtggtacttggtagctccaatccacgagtattcactgttgttgttgtccgcagatgtctttgatactcgctgctggcggtaacagggtccaggaagccagttcctagactgatcccgaatgtcactcgctccggcctgagaaaactgaagcctggactgcgtggtggttccgcttggagtgtttgttctgctcaagtaatacaggtactggtcgatgagaggattcatgagacggtccaaactctggctgtgagcgtagctgctgtggaaaggaacatcctcaaaggtgtagctgaaggtaaagttgtttccggtacgcagcatctgagaagggaagtactccaggcagtaaaatgaagagcgtcctactgcctgactcccgttgttcagggtgaggtatccatactgtggcaccatgaagacgtctgctgggaacggcgggaggcatccttgatgcgccgagccgaggacgtacgggagctggtactccgagtcagtaaacacctgaaccgtgctggtaaggttattggcaatcgtcgtcgtaccatcattctgcgtgacctctctgacttgaatgttaaagagcttgaagttgagtctcttgggccggaatccccagttgttgttgatgagtctttgccagtcacgtggtgaaaagtggcagtggaatctgttgaagtcaaaatacccccaaggggtgctgtagccaaagtagtggttgtcgttgctggctcctgattggctggaaatctgcttgtacagatggttgttgtaggtgggcagagcccaggttcgggtgctggtggtgatgactctgtcgcccatccatgtggaatcgcaatgccaatttcccgaggaattacccactccgtcggcgccatcgttattgtctgccattggtgcgccactgcctgtagccatcgtattagttcccagaccagagggggctgctggtggctgtccgagaggctgggggtcaggtacggagtctgcgtctccagtctgaccgaaattcaatctctttcttgcaggctggttgcccgcttttccggttcccgaggaggagtctggctccacaggagagtgctctaccggcctcttttttcccggagccgtcttaacaggctcctcaaccaggcccagaggttcaagaaccctcttttttgcctggaagactgctcgtccgaggttgcccccaaaagacgtatcttctttaaggcgctcctgaaactccgcgtcggcgtggtcgtacttgaggtacgggttgtctccgctgtcgagctgccggtcgtaggccttgtcgtgctcgagggccgcggcgtctgcctcgttgaccggctctcccttgtcgagtccgttgaagggtccgaggtacttgtacccaggaagcacaagacccctgctgtcgtccttatgccgctctgcgggctttggtggtggtgggccaggtttgagcttccaccactgtcttattccttcagagagagtgtcctcgagccaatctggaagataaccatcggcagccatacctgatttaaatcatttattgttcagagatgcagtcatccaaatccacattgaccagatcgcaggcagtgcaagcgtctggcacctttcccatgatatgatgaatgtagcaaagtttctgatacgcctttttgacgacagaaacgggttgagattctgacacgggaaagcactctaaacagtctttctgtccgtgagtgaagcagatatttgaattctgattcattctctcgcattgtctgcagggaaacagcatcagattcatgcccacgtgacgagaacatttgttttggtacctgtccgcgtagttgatcgaagcttccgcgtctgacgtcgatggctgcgcaactgactcgcgcgcccgtttgggctcacttatatctgcgtcactgggggcgggtcttttcttggctccaccctttttgacgtagaattcatgctccacctcaaccacgtgatcctttgcccaccggaaaaagtctttcacttcctgcttggtgaccttcccaaagtcatgatccagacggcgggttagttcaaatttgaacatccggtcttgcaacggctgctggtgttcgaaggtcgttgagttcccgtcaatcacggcgcacatgttggtgttggaggtggcgatcacgggagtcgggtctatctgggccgaggacttgcacttttggtccacgcgcaccttgcttcctccgagaatggcttcggccgattccacgaccttggcggtcatctttccctcctcccaccagatcaccatcttgtcgacacagtcgttgaagggaaagttctcattggtccagttgacgcagcaagggcgaattcgtttaaacctgcaggaactagtcccttagtgagg

SEQ ID NO: 4816 - protein, 735 aa, Adeno-associated virus
MAADGYLPDWLEDTLSEGIRQWWKLKPGPPPPKPAERHKDDSRGLVLPGYKYLGPFNGLYKGEPVNEADAAALEHDKAYDRQLDSGDNPYLKYNHAGAEFQERLKEDTSFGGNLGRAVFQAKKRVLEPLGLVEEPVKTAPGKKRPVEHSPVEPDSSSGTGKAGNQPARKRLNFGQTGDADSVPDPQPLGQPPAAPSGLGSTTMATGSGAPVADNNEGADGVGNSSGNWHCDSQWLGDRVITTSTRTWALPTYNNHLYKQISSQSGASNDNHYFGYSTPWGYFDFNRFHCHFSPRDWQRLINNNWGFRPKRLNFKLFNIQVKEVTQNDGTTTIANNLTSTVQVFTDSEYQLPYVLGSAHQGCLPPFPADVFMVPQYGYLTLNNGSQAVGRSSFYCLEYFPSQMLRTGNNFQFSYTFEDVPFHSSYAHSQSLDRLMNPLIDQYLYYLNKTQSNSGTLQQSRLLFSQAGPTSMSLQAKNWLPGPCYRQQRLSKQANDNNNSNFPWTAATKYHLNGRDSLVNPGPAMASHKDDEEKFFPMHGTLIFGKQGTNANDADLDNVMITDEEEIRTTNPVATEQYGYVSNNLQDSNTGPTTGTVNHQGALPGMVWQDRDVYLQGPIWAKIPHTDGHFHPSPLMGGFGLKHPPPQIMIKNTPVPANPPTNFSSAKFASFITQYSTGQVSVEIEWELQKENSKRWNPEIQYTSNYNKSVNVDFTVDTNGVYSEPRPIGTRYLTRNL

SEQ ID NO: 4817 - DNA, 2208 bp, Adeno-associated virus
atggctgccgatggttatcttccagattggctcgaggacactctctctgaaggaataagacagtggtggaagctcaaacctggcccaccaccgccaaagcccgcagagcggcataaggacgacagcaggggtcttgtgcttcctgggtacaagtacctcggacccttcaacggactctacaagggagagccggtcaacgaggcagacgccgcggccctcgagcacgacaaggcctacgaccggcagctcgacagcggagacaacccgtacctcaagtacaaccacgccggcgcggagtttcaggagcgccttaaagaagatacgtcttttgggggcaacctcggacgagcagtcttccaggccaaaaagagggttcttgaacctctgggcttggttgaggagcctgttaaaacggctccgggaaaaaagaggccggtagagcactctcctgtggagccagactcctcctcgggaaccggaaaagcgggcaaccagcctgcaagaaaaagattgaattttggtcagactggagacgcagactccgtacctgacccccagcctctcggacagccaccagcagccccctctggtctgggatctactacaatggctacaggcagtggcgcaccagtggcagacaataacgagggtgccgatggagtgggtaattcctcaggaaattggcattgcgattcccaatggctgggcgacagagtcatcaccaccagcacccgaacctgggctctgcccacctacaacaaccacctctacaagcaaatctccagccaatcaggagcctcaaacgacaaccactactttggctacagcaccccctgggggtattttgacttcaacagattccactgccacttttcaccacgtgactggcaaagactcatcaacaacaactggggattccgaccaaagagactcaacttcaagctctttaacattcaagtcaaagaggtcacgcagaatgacggtacgacgacgattgccaataaccttaccagcacggttcaggtgtttactgactcggagtaccagctcccgtacgtcctcggctcggcgcatcaaggatgcctcccgccgttcccagcagacgtcttcatggtgccacagtatggatacctcaccctgaacaacgggagtcaggcggtaggacgctcttccttttactgcctggagtactttccttctcagatgctgcgtactggaaacaactttcagttcagctacacctttgaagacgttcctttccacagcagctacgctcacagccagagtctggatcggctgatgaatcctctgatcgaccagtacctgtattatctgaacaagacacaatcaaatagtggaacccttcagcagtctcggctactgtttagccaagctggacccaccagcatgtctcttcaagctaaaaactggctgcctggaccttgctacagacagcagcgtctgtcaaagcaggcaaacgacaacaacaacagcaactttccctggactgcggctacaaagtatcatctaaatggccgggactcgttggttaatccaggaccagctatggccagccacaaagacgatgaagaaaagtttttccccatgcatggaaccctgatatttggtaaacaaggaacaaatgctaacgacgcggatttggacaatgtcatgattacagatgaagaagaaatccgcaccaccaatcccgtggctacggagcagtacggatatgtgtcaaataatttgcaagactcaaatactggtccaactactggaactgtcaatcaccaaggagcgttacctggtatggtgtggcaggatcgagacgtgtacctgcagggacccatttgggccaagattcctcacaccgatggacactttcatccttctccacttatgggaggttttggactcaaacacccacctcctcagatcatgattaaaaacactcccgttccagccaatcctcccacaaacttcagttctgccaagtttgcttctttcatcacacagtattccacgggacaagtcagcgtagagatcgagtgggagctgcagaaggagaacagcaaacgctggaaccccgagatccagtacacttccaactataacaaatctgttaatgtggactttactgtggacactaatggtgtgtattcagagcctcgccccattggcaccagatacctgactcgtaatctgtaa

SEQ ID NO: 4818 - protein, 738 aa, Adeno-associated virus
MAADGYLPDWLEDNLSEGIREWWDLKPGAPKPKANQQKQDDGRGLVLPGCKYLGPFNGLDKGEPVNAADAAALEHDKAYDQQLKAGDNPYLRYNHADAEFQERLQEDTSFGGNLGRAVFQAKKRVLEPLGLVEEGAKTAPGKKRPVEPSPQRSPDSSTGIGKTGQQPAKKRLNFGQTGDSESVPDPQPIGEPPAGPSGLGSGTMAAGGGAPMADNNEGADGVGSSSGNWHCDSTWLGDRVITTSTRTWALPTYNNHLYKQISNGTSGGSTNDNTYFGYSTPWGYFDFNRFHCHFSPRDWQRLINNNWGFRPKRLNFKLFNIQVKEVTQNEGTKTIANNLTSTIQVFTDSEYQLPYVLGSAHQGCPPPFPADVFMIPQYGYLTLNNGSQAVGRSSFYCLEYFPSQMRRTGNNFEFSYQFEDVPFHSSYAHSQSLDRLMNPLIDQYLYYLSRTQSTGGTAGTQQLLFSQAGPNNMSAQAKNWLPGPCYRQQRVSTTLSQNNNSNFAWTGATKYHLNGRDSLVNPGVAMATHKDDEERFFPSSGVLMFGKQGAGKDNVDYSSVMLTSEEEIKTTNPVATEQYGVVADNLQQQNAAPIVGAVNSQGALPGMVWQNRDVYLQGPIWAKIPHTDGNFHPSPLMGGFGLKHPPPQILIKNTPVPADPPTTFSQAKLASFITQYSTGQVSVEIEWELQKENSKRWNPEIQYTSNYNKSVNVDFTVDTNGVYSEPRPIGTRYLTRNL

SEQ ID NO: 4819 - DNA, 2217 bp, Adeno-associated virus
atggctgccgatggttatcttccagattggctcgaggacaacctctctgagggcattcgcgagtggtgggacttgaaacctggagccccgaaacccaaagccaaccagcaaaagcaggacgacggccggggtctggtgcttcctggctgcaagtacctcggacccttcaacggactcgacaagggggagcccgtcaacgcggcggacgcagcggccctcgagcacgacaaggcctacgaccagcagctcaaagcgggtgacaatccgtacctgcggtataaccacgccgacgccgagtttcaggagcgtctgcaagaagatacgtcttttgggggcaacctcgggcgagcagtcttccaggccaagaagcgggttctcgaacctctcggtctggttgaggaaggcgctaagacggctcctggaaagaagagaccggtagagccatcaccccagcgttctccagactcctctacgggcatcggcaagacaggccagcagcccgcgaaaaagagactcaactttgggcagactggcgactcagagtcagtgcccgaccctcaaccaatcggagaaccccccgcaggcccctctggtctgggatctggtacaatggctgcaggcggtggcgctccaatggcagacaataacgaaggcgccgacggagtgggtagttcctcaggaaattggcattgcgattccacatggctgggcgacagagtcatcaccaccagcacccgaacctgggccctccccacctacaacaaccacctctacaagcaaatctccaacgggacatcgggaggaagcaccaacgacaacacctacttcggctacagcaccccctgggggtattttgactttaacagattccactgccacttctcaccacgtgactggcagcgactcatcaacaacaactggggattccggcccaagagactcaacttcaagctcttcaacatccaggtcaaggaggtcacgcagaatgaaggcaccaagaccatcgccaataaccttaccagcacgattcaggtctttacggactcggaataccagctcccgtacgtcctcggctctgcgcaccagggctgcccgcctccgttcccggcggacgtcttcatgattcctcagtacgggtacctgactctgaacaacggcagtcaggccgtgggccgttcctccttctactgcctggagtactttccttctcaaatgcggagaacgggcaacaactttgagttcagctaccagtttgaggacgtgccttttcacagcagctacgcgcatagccaaagcctggaccggctgatgaaccccctcatcgaccagtacctgtactacctgtctcggactcagtccacgggaggtaccgcaggaactcagcagttgctattttctcaggccgggcctaataacatgtcggctcaggccaaaaactggctacccgggccctgctaccggcagcaacgcgtctccacgacactgtcgcaaaataacaacagcaactttgcttggaccggtgccaccaagtatcatctgaatggcagagactctctggtaaatcccggtgtcgctatggcaacgcacaaggacgacgaagagcgattttttccatccagcggagtcttgatgtttgggaaacagggagctggaaaagacaacgtggactatagcagcgttatgctaaccagtgaggaagaaatcaaaaccaccaacccagtggccacagaacagtacggcgtggtggccgataacctgcaacagcaaaacgccgctcctattgtaggggccgtcaacagtcaaggagccttacctggcatggtctggcagaaccgggacgtgtacctgcagggtcctatctgggccaagattcctcacacggacggcaactttcatccttcgccgctgatgggaggctttggactgaaacacccgcctcctcagatcctgattaagaatacacctgttcccgcggatcctccaactaccttcagtcaagccaagctggcgtcgttcatcacgcagtacagcaccggacaggtcagcgtggaaattgaatgggagctgcagaaagagaacagcaagcgctggaacccagagattcagtatacttccaactataacaaatctgttaatgtggactttactgtggacactaatggtgtgtattcagagcctcgccccattggcaccagatacctgactcgtaatctgtaa

SEQ ID NO: 4820 - DNA, 3167 bp, Adeno-associated virus
attgaatttagcggccgcgaattcgcccttcgcagagaccaaagttcaactgaaacgaattaaacggtttattgattaacaagcaattacagattacgagtcaggtacctggtgccaatggggcgaggctctgaatacacaccattagtgtccacagtaaagtccacattaacagatttgttgtagttggaagtgtactgaatctcgggattccagcgtttgctgttctccttctgcagctcccactcgatctccacgctgacctgccccgtggagtactgtgtaatgaaggaagcaaactttgccgcactgaaggtagtcgaaggattcgcaggtaccggggtgttcttgatgagaatctgcgggggagggtgtttaagtccgaatccgcccatgaggggagaggggtgaaaatgtccgtccgtgtgtggaatctttgcccagatgggcccctgcaggtacacgtctctgtcctgccacaccatgcctggaagaacgccttgtgtgttgacatctgaggtagctgcttgtgtgttgccgctctggaggttggtagatacagaaccatactgctccgtagccacgggattggtggtcctgatttcctcttcgtctgtaatcatgaccttttcaatgtccacattagtttttcccgagtcttgttttccaaagatgagaaccccgctctgaggaaaaaacttttcttcatcgtccttgtggctggccatggccgggcccggattcaccagagagtctcttccattaaggtggtacttggtagctccagtccacgagtattcactgttgttgttatccgcagatgtctttgatactcgctgctggcggtaacagggtccaggaagccagttcctagactggtcccgaatgtcacttgctccggcctgagaaaactgaagccttgactgcgtggtggttccgcttggagtgtttgttctgctcaagtaatacaggtactggtcgatgagaggattcatgagacggtccaaactctggctgtgggcgtagctgctgtggaaaggaacgtcctcaaaggtgtagctgaaggtaaagttgtttccggtacgcagcatctgagaaggaaagtactccaggcagtaaaatgaagagcgtcctactgcctgactcccgttgttcagggtgaggtatccatactgtggcaccatgaagacgtctgctgggaacggcgggaggcatccttgatgcgccgagccgaggacgtacgggagctggtactccgagtcagtaaacacctgaaccgtgctggtaaggttattggcaatcgtcgtcgtaccgtcattctgcgtgacctccttgacttgaatgttaaagagcttgaagttgagtcttttgggccggaatccccaattgttgttgatgagtctttgccagtcacgtggcgaaaagtggcagtggaatctgttgaagtcaaaatacccccaaggggtgctgtagccaaagtagtggttgtcgtttgaggctcctgattggctggaaatctgcttgtagaggtggttgttgtaggtgggcagagcccaggtgcgggtgctggtggtgatgactctgtcgcccatccatgtggaatcgcaatgccaatttcccgaggaattacccactccgtcggcgccctcgttattgtctgccattggtgcgccactgcctgtagccatcgtattagttcccagaccagagggggctgctggtggctgtccgagaggctgggggtcaggtacggagtctgcgtctccagtctgaccgaaattcaatctctttcttgcaggctgctggcccgcttttccggttcccgaggaggagtctggctccgcaggagagtgctctaccggcctcttttttcccggagccgtcttaacaggttcctcaaccaggcccagaggttcaagaaccctctttttcgcctggaagactgctcgtccgaggttgcccccaaaagacgtatcttctttaagacgctcctggaactccgcgtcggcgtggttgtacttggggtacgggttgtctccgctgtcgagctgccggtcgtaggccttgtcgtgctcgagggccgcggcgtctgcctcgttgaccggctctcccttgtcgagtccgttgaagggtccaaggtacttgtacccaggaagcacaagacccctgctgtcgtccttatgccgctctgcgggctttggtggtggtgggccaggtttgagcttccaccactgtcttattccttcagagagagtgtcctcgagccaatctggaagataaccatcggcagccatacctgatttaaatcatttattgttcagagatgcagtcatccaaatccacattgaccagatcgcaagcagtgcaagcgtctggcacctttcccatgatatgatgaatgtagcacagtttctgatacgcctttttgacgacagaaacgggttgagattctgacacgggaaagcactctaaacagtctttctgtccgtgagtgaagcagatatttgaattctgattcattctctcgcattgtctgcagggaaacagcatcagattcatgcccacgtgacgagaacatttgttttggtacctgtccgcgtagttgattgaagcttccgcgtctgacgtcgatggctgcgcaactgactcgcgcgcccgtttgggctcacttatatctgcgtcactgggggcgggtctttttttggctccaccctttttgacgtagaattcatgctctacctcaaccacgtgatcctttgcccaccggaaaaagtctttgacttcctgcttggtgaccttcccaaagtcatgatccagacggcgggtgagttcaaatttgaacatccggtcttgcaacggctgctggtgttcgaaggtcgttgagttcccgtcaatcactgcgcacatgttggtgttggaggtgacaatcacgggagtcgggtctatctgggccgaggacttgcatttctggtccacgcgcaccttgcttcctccgagaatggctttggccgactccacgaccttggcggtcatcttcccctcctcccaccagatcaccatcttgtcgacgcaatcattgaaaggaaagttctcattggtccagttgacgcagccgtagaaagggcgaattcgtttaaacctgcaggactagtccctttagtgagggt

SEQ ID NO: 4821 - DNA, 3161 bp, Adeno-associated virus
aattgaatttagcggccgcgaattcgcccttcgcagagaccaaagttcaactgaaacgaattaaacggtttattgattaacaagcaattacagattacgagtcaggtatctggtgccaatggggcgaggctctgaatacacaccattagtgtccacagtaaagtccacattaacagatttgttgtagttggaagtgtactgaatctcgggattccagcgtttgctgttctccttctgcagctcccactcgatctccacgctgacctgccccgtggagtactgtgtaatgaaggaagcaaactttgccgcactgaaggtagtcgaaggattcgcaggtaccggggtgttcttgatgagaatctgcgggggagggtgtttaagtccgaatccgcccatgaggggagaggggtgaaaatgtccgtccgtgtgtggaatctttgcccagatgggcccctgcaggtacacgtctctgtcctgccacaccatgcctggaagaacgccttgtgtgttgacatctgaggtagctgcttgtgtgttgccgctctggaggttggtagatacagaaccatactgctccgtagccacgggattggtggtcctgatttcctcttcgtctgtaatcatgaccttttcaatgtccacattagtttttcccgagtcttgttttccaaagatgagaaccccgctctgaggaaaaaacttttcttcatcgtccttgtggctggccatggccgggcccggattcaccagagagtctcttccattaaggtggtacttggtagctccagtccacgagtattcactgttgttgttatccgcagatgtctttgatactcgctgctggcggtaacagggtccaggaagccagttcctagactggtcccgaatgtcacttgctccggcctgagaaaactgaagccttgactgcgtggtggttccgcttggagtgtttgttctgctcaagtaatacaggtactggtcgacgagaggattcatgagacggtccaaactctggctgtgggcgtagctgctgtggaaaggaacgtcctcaaaggtgtagctgaaggtaaagttgtttccggtacgcagcatctgagaaggaaagtactccaggcagtaaaatgaagagcgtcctactgcctgactcccgttgttcagggtgaggtatccatactgtggcaccatgaagacgtctgctgggaacggcgggaggcatccttgatgcgccgagccgaggacgtacgggagctggtactccgagtcagtaaacacctgaaccgtgctggtaaggttattggcaatcgtcgtcgtaccgtcattctgcgtgacctccttgacttgaatgttaaagagcttgaagttgagtcttttgggccgggatccccaattgttgttgatgagtctttgccagtcacgtggcgaaaagtggcagtggaatctgttgaagtcaaaatacccccaaggggtgctgtagccaaagtagtggttgtcgtttgaggctcctgattggctggaaatctgcctgtagaggtggttgttgtaggtgggcagagcccaggtgcgggtgctggtggtgatgactctgtcgcccatccatgtggaatcgcaatgccaatttcccgaggaattacccactccgtcggcgccctcgttattgtctgccattggtgcgccactgcctgtagccatcgtattagttcccagaccagagggggctgctggtggctgtccgagaggctgggggtcaggtacggagtctgcgtctccagtctgaccgaaattcaatctccttcttgcaggctgctggcccgcttttccggttcccgaggaggagtctggctccgcaagagagtgctctaccggcctcttttttcccggagccgtcttaacaggttcctcaaccaggcccagaggttcaagaaccctctttttcgcctggaagactgctcgtccgaggttgcccccaaaagacgtatcttctttaagacgctcctggaactccgcgtcggcgtggttgtacttgaggtacgggttgtctccgccgtcgagctgccggtcgtaggccttgtcgtgctcgagggccgcggcgtctgcctcgttgaccggctctcccttgtcgagtccgttgaagggtccaaggtacttgtacccaggaagcacaagacccctgctgtcgtccttatgccgctctgcgggctttggtggtggtgggccaggtttgagcttccaccactgtcttattccttcagagagagtgtcctcgagccaatctggaagataaccatcggcagccatacctgatttaaatcatttattgttcagagatgcagtcatccaaatccacattgaccagatcgcaagcagtgcaagcgtctggcacctttcccatgatatgatgaatgtagcacagtttctgatacgcctttttgacgacagaaacgggttgagattctgacacgggaaagcactctaaacagtctttctgtccgtgagtgaagcagatatttgaattctgattcattctctcgcattgtctgcagggaaacagcatcagattcatgcccacgtgacgagaacatttgttttggtacctgtccgcgtagttgattgaagcttccgcgtctgacgtcgatggctgcgcaactgactcgcgcgcccgtttgggctcacttatatctgcgtcactgggggcgggtctttttttggctccaccctttttgacgtagaattcatgctctacctcaaccacgtgatcctttgcccaccggaaaaagtctttgacttcctgcttggtgaccttcccaaagtcatgatccagacggcgggtgagttcaaatttgaacatccggtcttgcaacggctgctggtgttcgaaggtcgttgagttcccgtcaatcactgcgcacatgttggtgttggaggtgacaatcacgggagtcgggtctatctgggccgaggacttgcatttctggtccacgcgcaccttgcttcctccgagaatggctttggccgactccacgaccttggcggtcatcttcccctcctcccaccagatcaccatcttgtcgacgcaatcattgaaaggaaagttctcattggtccagttgacgcagcaagggcgaattcgtttaaacctgcaggactagtccctttagtgaggg

SEQ ID NO: 4822 - DNA, 3172 bp, Adeno-associated virus
gattgaatttagcggccgcgaattcgcccttgctgcgtcaactggaccaatgagaactttcccttcaacgattgcgtcgacaagatggtgatctggtgggaggagggcaagatgaccgccaaggtcgtggagtccgccaaggccattctgggtggaagcaaggtgcgcgtggaccaaaagtgcaagtcatcggcccagatcgaccccacgcccgtgatcgtcacctccaacaccaacatgtgcgccgtgatcgacgggaacagcaccaccttcgagcaccagcagcccctgcaggaccgcatgttcaagttcgagctcacccgccgtctggagcacgactttggcaaggtgaccaagcaggaagtcaaagagttcttccgctgggctcaggatcacgtgactgaggtggcgcatgagttctacgtcagaaagggcggagccaccaaaagacccgcccccagtgacgcggatataagcgagcccaagcgggcctgcccctcagttgcggagccatcgacgtcagacgcggaagcaccggtggactttgcggacaggtaccaaaacaaatgttctcgtcacgcgggcatgcttcagatgctgtttccctgcaagacatgcgagagaatgaatcagaatttcaacgtctgcttcacgcacggggtcagagactgctcagagtgcttccccggcgcgtcggaatctcaacccgtcgtcagaaaaaagacgtatcagaaactgtgcgcgattcatcatctgctggggcgggcacccgagattgcgtgttcggcctgcgatctcgtcaacgtggacttggatgactgtgtttctgagcaataaatgacttaaaccaggtatggctgctgacggttatcttccagattggctcgaggacaacctctctgagggcattcgcgagtggtgggacctgaaacctggagcccccaagcccaaggccaaccagcagaagcaggacgacggccggggtctggtgcttcctggctacaagtacctcggacccttcaacggactcgacaagggggagcccgtcaacgcggcggacgcagcggccctcgagcacgacaaggcctacgaccagcagctcaaagcgggtgacaatccgtacctgcggtataaccacgccgacgccgagtttcaggagcgtctgcaagaagatacgtcttttgggggcaacctcgggcgagcagtcttccaggccaagaagcgggttctcgaacctctcggtctggttgaggaagctgctaagacggctcctggaaagaagagaccggtagaaccgtcacctcagcgttcccccgactcctccgcgggcatcggcaagaaaggccagcagcccgctaaaaagagactgaactttggtcagactggcgactcagagtcagtccccgaccctcaaccaatcggagaaccaccagcaggcccctctggtctgggatctggtacaatggctgcaggcggtggcgctccaatggcagacaataacgaaggcgccgacggagtgggtagttcctcaggaaattggcattgcgattccacatggctgggcgacagagtcatcaccaccagcacccgaacctgggccctgcccacctacaacaaccacctctacaagcaaatatccaatgggacatcgggaggaagcaccaacgacaacacctacttcggctacagcaccccctgggggtattttgacttcaacagattccactgccacttctcaccacgtgactggcagcgactcatcaacaacaactggggattccggccaaaaagactcagcttcaagctcttcaacatccaggtcaaggaggtcacgcagaatgaaggcaccgagaccatcgccaataaccttaccagcacgattcaggtatttacggactcggaataccagctgccgtacgtcctcggctccgcgcaccagggctgcctgcctccgttcccggcggacgtcttcatgattccccagtacggctaccttacactgaacaatggaagtcaagccgtaggccgttcctccttctactgcctggaatattttccatctcaaatgctgcgaactggaaacaattttgaattcagctacaccttcgaggacgtgcctttccacagcagctgcgcacacagccagagctcggaccgactgatgaatcctctcatcgaccagtacctgtactacttatccagaactcggtccacaggaggaactcaaggtacccagcaattgttattttctcaagctgggcctgcaaacatgtcggctcaggctaagaactggctacctggaccttgctaccggcagcagcgagtctctacgacactgtcgcaaaacaacaacagcaactttgcttggactggtgccaccaaatatcacctgaacggaagagactctttggtaaatcccggtgtcgccatggcaacccacaaggacgacgaggaacgcttcttcccgtcgagtggagtcctgatgtttggaaaacagggtgctggaagagacaatgtggactacagcagcgttatgctaaccagcgaagaagaaattaaaaccactaaccctgtagccacagaacaatacggtgtggtggctgacaacttgcagcaaaccaatacagggcctattgtgggaaatgtcaacagccaaggagccttacctggcatggtctggcagaaccgagacgtgtacctgcagggtcccatctgggccaagattcctcacacggacggcaacttccacccttcaccgctaatgggaggatttggactgaagcacccacctcctcagatcctgatcaagaacacgccggtacctgcggatcctccaacaacgttcagccaggcgaaattggcttccttcattacgcagtacagcaccggacaggtcagcgtggaaatcgagtgggagctgcagaaggagaacagcaaacgctggaacccagagattcagtacacttcaaactactacaaatctacaaatgtggactttgctgtcaatacagagggaacttattctgagcctcgccccattggtactcgttacctcacccgtaatctgtaattgctggttaatcaataaaccgtttgattcgtttcagttgaactttggtctctgcgaagggcgaattcgtttaaacctgcaggactagtccctttagtgagg

SEQ ID NO: 4823 - DNA, 3172 bp, Adeno-associated virus
gattgaatttagcggccgcgaattcgcccttgctgcgtcaactggaccaatgagaactttcccttcaacgattgcgtcgacaagatggtgatctggtgggaggagggcaagatgaccgccaaggtcgtggagtccgccaaggccattctgggtggaagcaaggtgcgcgtggaccaaaagtgcaagtcatcggcccagatcgaccccacgcccgtgatcgtcacctccaacaccaacatgtgcgccgtgatcggcgggaacagcaccaccttcgagcaccagcagcccctgcaggaccgcatgttcaagttcgagctcacccgccgtctggagcacgactttggcaaggtgaccaagcaggaagtcaaagagttcttccgctgggctcaggatcacgtgactgaggtggcgcatgagttctacgtcagaaagggcggagccaccaaaagacccgcccccagtgacgcggatataagcgagcccaagcgggcctgcccctcagttgcggagccatcgacgtcagacgcggaagcaccggtggactttgcggacaggtaccaaaacaaatgttctcgtcacgcgggcatgcttcagatgctgtttccctgcaagacatgcgagagaatgaatcagaatttcaacgtctgcttcacgcacggggtcagagactgctcagagtgcctccccggcgcgtcagaatctcaacccgtcgtcagaaaaaagacgtatcagaaactgtgcgcgattcatcatctgctggggcgggcacccgagattgcgtgttcggcctgcgatctcgtcaacgtggacttggatgactgtgtttctgagcaataaatgacttaaaccaggtatggctgctgacggttatcttccagattggctcgaggacaacctctctgagggcattcgcgagtggtgggacctgaaacctggagcccccaagcccaaggccaaccagcagaagcaggacgacggccggggtctggtgcttcttggctacaagtacctcggacccttcaacggactcgacaagggggagcccgtcaatgcggcggacgcagcggccctcgagcacgacaaggcctacgaccagcagctcaaagcgggtgacaatccgtacctgcggtataaccacgccgacgccgagtttcaggagcgtctgcaagaagatacgtcttttgggggcaacctcgggcgagcagtcttccaggccaagaagcgggttctcgaacctctcggtctggttgaggaagctgctaagacggctcctggaaagaagagaccggtagaaccgtcacctcagcgttcccccgactcctccacgggcatcggcaagaaaggccagcagcccgctaaaaagagactgaactttggtcagactggcgactcagagtcagtccccgaccctcaaccaatcggagaaccaccagcaggcccctctggtctgggatctggtacaatggctgcaggcggtggcgctccaatggcagacaataacgaaggcgccgacggagtgggtagttcctcaggaaattggcattgcgattccacatggctgggcgacagagtcatcaccaccagcacccgaacctgggccctgcccacctacaacaaccacctctacaagcaaatatccaatgggacatcgggaggaagcaccaacgacaacacctacttcggctacagcaccccctgggggtattttgacttcaacagattccactgccacttctcaccacgtgactggcagcgactcatcaacaacaactggggattccggccaaaaagactcagcttcaagctcttcaacatccaggtcaaggaggtcacgcagaatgaaggcaccaagaccatcgccaataaccttaccagcacgattcaggtatttacggactcggaataccagctgccgtacgtcctcggctccgcgcaccagggctgcctgcctccgttcccggcggacgtcttcatgattccccagtacggctaccttacactgaacaatggaagtcaagccgtaggccgttcctccttctactgcctggaatattttccatctcaaatgctgcgaactggaaacaattttgaattcagctacaccttcgaggacgtgcctttccacagcggctacgcacacagccagagcttggaccgactgatgaatcctctcatcgaccagtacctgtactacttatccagaactcagtccacaggaggaactcaaggtacccagcaattgttattttctcaagctgggcctgcaaacatgtcggctcaggctaagaactggctacctggaccttgctaccggcagcagcgagtctctacgacactgtcgcaaaacaacaacagcaactttgcttggactggtgccaccaaatatcacctgaacggaagagactctttggtaaatcccggtgtcgccatggcaacccacaaggacgacgaggaacgcttcttcccgtcgagtggagtcctgatgtttggaaaacagggtgctggaagagacaatgtggactacagcagcgttatgctaaccagcgaagaagaaattaaaaccactaaccctgtagccacagaacaatacggtgtggtggctgacaacttgcagcaaaccaatacagggcctattgtgggaaatgtcaacagccaaggagccttacctggcatggtctggcagaaccgagacgtgtacctgcagggtcccatctgggccaagattcctcacacggacggcaacttccacccttcaccgctaatgggaggatttggactgaagcacccacctcctcagatcctgatcaagaacacgccggtacctgcggatcctccaacgacgttcagccaggcgaaattggcttccttcattacgcagtacagcaccggacaggtcagcgtggaaatcgagtgggagctgcagaaggagaacagcaaacgctggaacccagagattcagtacacttcaaactactacaaatctacaaatgtggactttgctgtcaatacagagggaacttattctgagcctcgccccattggtactcgttacctcacccgtaatctgtaattgctggttaatcaataaaccgtttgattcgtttcagttgaactttggtctctgcgaagggcgaattcgtttaaacctgcaggactagtccctttagtgagg

SEQ ID NO: 4824 - DNA, 2208 bp, Adeno-associated virus
atggctgccgatggttatcttccagattggctcgaggacactctctctgaaggaataagacagtggtggaagctcaaacctggcccaccaccaccaaagcccgcagagcggcataaggacgacagcaggggtcttgtgcttcctgggtacaagtacctcggacccttcaacggactcgacaagggagagccggtcaacgaggcagacgccgcggccctcgagcacgacaaggcctacgaccggcagctcgaaagcggagacaacccgtacctcaagtacaaccacgccgacgcggagtttcaggagcgtcttaaagaagatacgtcttttgggggcaacctcggacgagcagtcttccaggcgaaaaagagggttcttgaacctctgggcctggttgaggagcctgttaaaacggctccgggaaaaaagaggccggtagagcactctcctgtggagccagactcctcctcgggaaccggaaaagcgggccagcagcctgcgagaaaaagattgaattttggtcagactggagacgcagactccgtacctgacccccagcctctcggacagccaccagcagccccctctggtctgggatctactacaatggcttcaggcagtggcgcaccagtggcagacaataacgagggtgccgatggagtgggtaattcctcaggaaattggcattgcgattcccaatggctgggcgacagagtcatcaccaccagcacccgaacctgggccctgcccacctacaacaaccacctctacaagcaaatctccagccaatcaggagcctcaaacgacaaccactactttggctacagcaccccctgggggtattttgacttcaacagattccactgccacttttcaccacgtgactggcaaagactcatcaacaacagctggggattccgacccaaaagactcaacttcaagctctttaacattcaagtcaaagaggtcacgcagaatgacggtacgacgacgattgccaataaccttaccagcacggttcaagtgtttaccgactcggagtaccagctcccgtacgtcctcggctcggcgcatcaaggatgcctcccgccgttcccagcagacgtctttatggtcccacagtatggatacctcaccctgaacaacgggagtcaggcggtaggacgctcttccttttactgcctggagtactttccttctcagatgctgcgtactggaaacaactttcagttcagctacacctttgaagacgttcccttccacagcagctacgctcacagccagagtctggatcggctgctgaatcctctgatcgaccagtacctatattatctgaacaagacacaatcaaatagtggaactcttcagcagtctcggctactgtttagccaagctggacccaccagcatgtctcttcaagctaaaaactggctgcctggaccttgctacagacagcagcgtctgtcaaagcaggcaaacgacaacaacaacagcaactttccctggactgcggctacaaagtatcatctaaatggccgggactcgttggttaatccaggaccagctatggccagccacaaagacgatgaagaaaagtttttccccatgcatggaaccctgatatttggtaaacaaggaacaaatgctaacgacgcggatttggacaatgtcatgattacagatgaagaagaaatccgcaccaccaatcccgtggctacggagcagtacggatatgtgtcaaataatttgcaaaactcaaatactggtccaactactggaactgtcaatcaccaaggagcgttacctggtatggtgtggcaggatcgagacgtgtacctgcagggacccatttgggccaagattcctcacacggacgggcactttcatccttctccactaatgggaggttttgggctcaaacacccgcctcctcagatcatgatcaaaaacactcccgttccagccaatcctcctacaaacttcagttcttccaagtttgcttctttcatcacacagtattccacggggcaggtcagcgtggagatcgagtgggagctgcagaaggagaacagcaaacgctggaatcccgaaattcagtatacttccaactacaacaaatctgttaatgtggactttactgtggacactaatggtgtgtattcagagcctcgccccattggcaccagatacccgactcgtaatctgtaa

SEQ ID NO: 4825 - protein, 735 aa, Adeno-associated virus
MAADGYLPDWLEDTLSEGIRQWWKLKPGPPPPKPAERHKDDSRGLVLPGYKYLGPFNGLDKGEPVNEADAAALEHDKAYDRQLESGDNPYLKYNHADAEFQERLKEDTSFGGNLGRAVFQAKKRVLEPLGLVEEPVKTAPGKKRPVEHSPVEPDSSSGTGKAGQQPARKRLNFGQTGDADSVPDPQPLGQPPAAPSGLGSTTMASGSGAPVADNNEGADGVGNSSGNWHCDSQWLGDRVITTSTRTWALPTYNNHLYKQISSQSGASNDNHYFGYSTPWGYFDFNRFHCHFSPRDWQRLINNSWGFRPKRLNFKLFNIQVKEVTQNDGTTTIANNLTSTVQVFTDSEYQLPYVLGSAHQGCLPPFPADVFMVPQYGYLTLNNGSQAVGRSSFYCLEYFPSQMLRTGNNFQFSYTFEDVPFHSSYAHSQSLDRLLNPLIDQYLYYLNKTQSNSGTLQQSRLLFSQAGPTSMSLQAKNWLPGPCYRQQRLSKQANDNNNSNFPWTAATKYHLNGRDSLVNPGPAMASHKDDEEKFFPMHGTLIFGKQGTNANDADLDNVMITDEEEIRTTNPVATEQYGYVSNNLQNSNTGPTTGTVNHQGALPGMVWQDRDVYLQGPIWAKIPHTDGHFHPSPLMGGFGLKHPPPQIMIKNTPVPANPPTNFSSSKFASFITQYSTGQVSVEIEWELQKENSKRWNPEIQYTSNYNKSVNVDFTVDTNGVYSEPRPIGTRYPTRNL

SEQ ID NO: 4826 - DNA, 2208 bp, Adeno-associated virus
atggctgccgatggttatcttccagattggctcgaggacactctctctgaaggaataagacagtggtggaagctcaaacctggcccaccaccaccaaagcccgcagagcggcataaggacgacagcaggggtcttgtgcttcctgggtacaagtacctcggacccttcaacggactcgacaagggagagccggtcaacgaggcagacgccgcggccctcgagcacgacaaggcctacgaccggcagctcgacagcggagacaacccgtacctcaagtacaaccacgccgacgcggagtttcaggagcgtcttaaagaagatacgtcttttgggggcaacctcggacgagcagtcttccaggccaaaaagaggattcttgaacctctgggcctggttgaggaacctgttaagacggctccgggagaaaagaggccggtagagcactctcctgcggagccagactcctcctcgggaaccggaaaagcgggccagcagcctgcaagaaagagattgaattttggccagactggagacgcagactcagtacctgacccccagcctctcggacagccaccagcagccccctctggtctgggaactaatacgatggcttcaggcagtggcgcaccaatggcagacaataacgagggcgccgacggagtgggtaattcctcgggaaattggtattgcgattccacatggatgggcgacagagtcatcaccaccagcacccgcacctgggccctgcccacctacaacaaccatctgtacaagcaaatctccagccagtctggagccagcaacgacaaccactactttggctacagcaccccctgggggtattttgacttcaacagattccactgccacttctccccacgtgactggcaaagactcatcaacaacaactggggattccggcccaagagactcagcttcaagctctttaacattcaagtcaaagaggtcacgcagaatgacggtacgacgacgattgccaataaccttaccagcacggttcaggtgtttactgactcggagtaccagctcccgtacgtcctcggctcggcgcatcaaggatgcctcccgccgttcccagcagacgtcttcatggtgccacagtatggatacctcaccctgaacaacggcagtcaggcggtaggacgctcttccttttactgcctggagtactttccttctcagatgcttcgtaccggaaacaactttaccttcagctacacctttgaagacgttcctttccatagcagctacgctcacagccaaagtctggaccgtctcatgaatcctctcatcgaccagtacctgtattacttgagcagaacaaacactccaagcggaaccaccacgatgtccaggcttcagttttctcaggccggagcaagtgacattcgggaccagtctagaaactggcttcctggaccctgttaccgccagcagcgagtatcaaagacagctgcggacaacaacaacagtgattactcgtggactggagctaccaagtaccacctcaatggaagagactctctggtgaatccgggcccagctatggccagccacaaggacgatgaagaaaaatattttcctcagagcggggttctcatctttggaaaacaagactcgggaaaaactaatgtggacattgaaaaggttatgattacagacgaagaggaaatcaggaccaccaatcccgtggctacggagcagtatggttctgtatctaccaacctccagagcggcaacacacaagcagctacctcagatgtcaacacacaaggcgttcttccaggcatggtctggcaggacagagacgtgtacctgcaggggcccatctgggcaaagattccacacacggacggacattttcacccctctcccctcgtgggcggattcggacttaaacaccctcctccacaaattctcatcaagaacaccccggtacctgcgaatccttcgaccactttcagtgcggcaaagtttgcttccttcatcacacagtactccacggggcaggtcagcgtggagatcgagtgggagctgcagaaggagaacagcaaacgctggaatcccgaaattcagtacacttccaactacaacaaatctgttaatgtggactttactgtggacactaatggtgtgtattcagagcctcgccccattggcaccagatacctgactcgtaatctgtaa

SEQ ID NO: 4827 - protein, 735 aa, Adeno-associated virus
MAADGYLPDWLEDTLSEGIRQWWKLKPGPPPPKPAERHKDDSRGLVLPGYKYLGPFNGLDKGEPVNEADAAALEHDKAYDRQLDSGDNPYLKYNHADAEFQERLKEDTSFGGNLGRAVFQAKKRILEPLGLVEEPVKTAPGEKRPVEHSPAEPDSSSGTGKAGQQPARKRLNFGQTGDADSVPDPQPLGQPPAAPSGLGTNTMASGSGAPMADNNEGADGVGNSSGNWYCDSTWMGDRVITTSTRTWALPTYNNHLYKQISSQSGASNDNHYFGYSTPWGYFDFNRFHCHFSPRDWQRLINNNWGFRPKRLSFKLFNIQVKEVTQNDGTTTIANNLTSTVQVFTDSEYQLPYVLGSAHQGCLPPFPADVFMVPQYGYLTLNNGSQAVGRSSFYCLEYFPSQMLRTGNNFTFSYTFEDVPFHSSYAHSQSLDRLMNPLIDQYLYYLSRTNTPSGTTTMSRLQFSQAGASDIRDQSRNWLPGPCYRQQRVSKTAADNNNSDYSWTGATKYHLNGRDSLVNPGPAMASHKDDEEKYFPQSGVLIFGKQDSGKTNVDIEKVMITDEEEIRTTNPVATEQYGSVSTNLQSGNTQAATSDVNTQGVLPGMVWQDRDVYLQGPIWAKIPHTDGHFHPSPLVGGFGLKHPPPQILIKNTPVPANPSTTFSAAKFASFITQYSTGQVSVEIEWELQKENSKRWNPEIQYTSNYNKSVNVDFTVDTNGVYSEPRPIGTRYLTRNL

SEQ ID NO: 4828 - DNA, 2209 bp, Adeno-associated virus
atggctgccgatggttatcctccagattggctcgaggacactctctctgaagggataagacagtggtggaagctcaaacctggcccaccaccaccaaagcccgcagagcggcataaggacgacagcaggggtcttgtgcttcctgggtacaagtacctcggacccttcaacggactcgacaagggggagccggtcaacgaggcagacgccgcggccctcgagcacgacaaggcctacgaccggcagctcgacagcggagacaacccgtacctcaagtacaaccacgccgacgcagagtttcaggagcgccttaaagaagatacgtcttttgggggcaacctcggacgagcagtcttccaggcgaaaaagagggttcttgaacctctgggcctggttgaggaacctgttaagacggctccgggaaaaaagaggccggtagagcactctcctgtggagccagactcctcctcgggaaccggaaaagcgggccagcggcctgcaagaaaaagattaaattttggtcagactggagacgcagactccgtacctgacccccagcctctcggacagccaccagcagccccctctggtctgggatctactacaatggctacaggcagtggcgcaccaatggcagacaataacgagggtgccgatggagtgggtaattcctcaggaaattggcattgcgattcccaatggctgggcgacagagtcatcaccaccagcacccgaacctgggccctgcccacatacaacaaccacctctacaagcaaatctccagccaatcaggagccagcaacgacaaccactactttggctacagcaccccctgggggtattttgacttcaacagattccactgccacttttcaccacgtgactggcaaagactcatcaacaacaactggggattccggcccaaaagactcaacttcaagctctttaatattcaagtcaaagaggtcacgcagaatgacggtacgacgacgattgccaataaccttaccagcacggttcaggtgtttactgactcggagtaccagctcccgtacgtcctgggctcggcgcatcaaggatgcctcccgccgtttccagcggacgtcttcatggtcccacagtatggatacctcaccctgaacaacgggagtcaggcggtaggacgctcttccttttactgcctggagtactttccttctcagatgctgcgtactggaaacaactttcagttcagctacacttttgaagacgtgcctttccacagcagctacgctcacagccagagtctggatcggctgatgaatcctctgatcgaccagtacctgtattatctgaacaagacacaaacaaatagtggaactcttcagcagtctcggctactgtttagccaagctggaccaaccaacatgtctcttcaagctaaaaactggctgcctggaccttgctacagacagcagcgtctgtcaaaacaggcaaacgacaacaacaacagcaactttccctggactgcagctacaaagtatcatctaaatggccgggactcgttggttaatccaggaccagctatggccagtcacaaggatgacgaagaaaagtttttccccatgcatggaaccctgatatttggtaaacaaggaacaaatgccaacgacgcggatttggaaaatgtcatgattacagatgaagaagaaatcagggccaccaatcccgtggctacggagcagtacgggactgtgtcaaataatttgcaaaactcaaacactggtccaactactggaactgtcaatcgccaaggagcgttacctggtatggtgtggcaggatcgagacgtgtacctgcagggacccatttgggccaagattcctcacaccgatggacactttcatccttctccactgatgggaggttttggactcaaacacccgcctcctcagatcatgatcaaaaacactcccgttccagccaatcctcccacaaacttcagttctgccaagtttgcttctttcatcacacagtattccacgggacaggtcagcgtggagatcgagtgggagctgcagaaggagaacagcaaacgctggaatcccgaaattcagtacacttccaactacaacaagtctgttaatgtggactttactgtggacactaatggtgtgtattcagagcctcgccccattggcaccagatacctgactcgtaatctgtaat

SEQ ID NO: 4829 - protein, 735 aa, Adeno-associated virus
MAADGYPPDWLEDTLSEGIRQWWKLKPGPPPPKPAERHKDDSRGLVLPGYKYLGPFNGLDKGEPVNEADAAALEHDKAYDRQLDSGDNPYLKYNHADAEFQERLKEDTSFGGNLGRAVFQAKKRVLEPLGLVEEPVKTAPGKKRPVEHSPVEPDSSSGTGKAGQRPARKRLNFGQTGDADSVPDPQPLGQPPAAPSGLGSTTMATGSGAPMADNNEGADGVGNSSGNWHCDSQWLGDRVITTSTRTWALPTYNNHLYKQISSQSGASNDNHYFGYSTPWGYFDFNRFHCHFSPRDWQRLINNNWGFRPKRLNFKLFNIQVKEVTQNDGTTTIANNLTSTVQVFTDSEYQLPYVLGSAHQGCLPPFPADVFMVPQYGYLTLNNGSQAVGRSSFYCLEYFPSQMLRTGNNFQFSYTFEDVPFHSSYAHSQSLDRLMNPLIDQYLYYLNKTQTNSGTLQQSRLLFSQAGPTNMSLQAKNWLPGPCYRQQRLSKQANDNNNSNFPWTAATKYHLNGRDSLVNPGPAMASHKDDEEKFFPMHGTLIFGKQGTNANDADLENVMITDEEEIRATNPVATEQYGTVSNNLQNSNTGPTTGTVNRQGALPGMVWQDRDVYLQGPIWAKIPHTDGHFHPSPLMGGFGLKHPPPQIMIKNTPVPANPPTNFSSAKFASFITQYSTGQVSVEIEWELQKENSKRWNPEIQYTSNYNKSVNVDFTVDTNGVYSEPRPIGTRYLTRNL

SEQ ID NO: 4830 - DNA, 2208 bp, Adeno-associated virus
atggctgccgatggttatcttccagattggctcgaggacactctctctgaaggaataagacagtggtggaagctcaaacctggcccaccaccaccaaagcccgcagagcggcataaggacgacagcaggggtcttgtgcttcctgggtacaggtacctcggacccttcaacggactcgacaagggagagccggtcaacgaggcagacgccgcggccctcgagcacgacaaggcctacgaccggcagctcgacagcggagacaacccgtacctcaagtacaaccacgtcgacgcggagtttcaggagcgtcttaaagaagatacgtcttttgggggcaacctcggacgagcagtcttccaggccaaaaagaggattcttgaacctctgggcctggttgaggaacctgttaaggcggctccgggagaaaagaggccggtagagcactctcctgcggagccagactcctcctcgggaaccggaaaagcgggccagcagcctgcaagaaagagattgaattttggtcagactggagacgcagactcagtacctgacccccagcctctcggacagccaccagcagccccctctggtctgggaactaatacgatggcttcaggcagtggcgcaccaatggcagacaataacgagggcgccgacggagtgggtaattcctcgggaaattggcattgcgattccacatggatgggcgacagagtcatcaccaccagcacccgcacctgggccctgcccacctacaacaaccatctgtacaagcaaatctccagccagtctggagccagcaacgacaaccactactttggctacagcaccccctgggggcattttgacttcaacagattccactgccacttctccccacgtgactggcaaagactcatcaacaacaactggggattccggcccaagagactcagcttcaagctctttaacattcaagtcaaagaggtcacgcagaatgacggtacgacgacgattgccaataaccttaccagcacggttcaggtgtttactgactcggagtaccagctcccgtacgtcctcggctcggcgcatcaaggatgcctcccgccgttcccagcagacgtcttcatggtgccacagtatggatacctcaccctgaacaacggcagtcaggcggtaggacgctcttccttttactgcctggagtactttccttctcagatgcttcgtaccggaaacaactttaccttcagctacacctttgaagacgttcctttccatagcagctacgctcacagccaaagtctggaccgtctcatgaatcctctcatcgaccagtacctgtattacttgagcagaacaaacactccaagcggaaccaccacgatgtccaggcttcagttttctcaggccggagcaagtgacattcgggaccagtctagaaactggcttcctggaccctgttaccgccagcagcgagtatcaaagacagctgcggacaacaacaacagtgattactcgtggactggagctaccaagtaccacctcaatggaagagactctctggtgaatccgggcccagctatggccagccacaaggacgatgaagaaaaatattttcctcagagcggggttctcatctttggaaaacaagactcgggaaaaactaatgtggacattgaaaaggttatgattacagacgaagaggaaatcaggaccaccaatcccgtggctacggagcagtatggttctgtatctaccaacctccagagcggcaacacacaagcagctacctcagatgtcaacacacaaggcgttcttccaggcatggtctggcaggacagagacgtgtacctgcaggggcccatctgggcaaagattccacacacggacggacattttcacccctctccccccatgggcggattcggacttaaacaccctcctccacaaattctcatcaagaacaccccggtacctgcgaatccttcgaccactttcagtgcggcaaagtttgcttccttcatcacacagtactccacggggcaggtcagcgtggagatcgagtgggagctgcagaaggagaacagcaaacgctggaatcccgaaattcagtacacttccaactacaacaaatctgttaatgtggactttactgtggacactaatggtgtgtattcagagcctcgccccattggcgccagatacctgactcgtaatctgtaa

SEQ ID NO: 4831 - protein, 735 aa, Adeno-associated virus
MAADGYLPDWLEDTLSEGIRQWWKLKPGPPPPKPAERHKDDSRGLVLPGYRYLGPFNGLDKGEPVNEADAAALEHDKAYDRQLDSGDNPYLKYNHVDAEFQERLKEDTSFGGNLGRAVFQAKKRILEPLGLVEEPVKAAPGEKRPVEHSPAEPDSSSGTGKAGQQPARKRLNFGQTGDADSVPDPQPLGQPPAAPSGLGTNTMASGSGAPMADNNEGADGVGNSSGNWHCDSTWMGDRVITTSTRTWALPTYNNHLYKQISSQSGASNDNHYFGYSTPWGHFDFNRFHCHFSPRDWQRLINNNWGFRPKRLSFKLFNIQVKEVTQNDGTTTIANNLTSTVQVFTDSEYQLPYVLGSAHQGCLPPFPADVFMVPQYGYLTLNNGSQAVGRSSFYCLEYFPSQMLRTGNNFTFSYTFEDVPFHSSYAHSQSLDRLMNPLIDQYLYYLSRTNTPSGTTTMSRLQFSQAGASDIRDQSRNWLPGPCYRQQRVSKTAADNNNSDYSWTGATKYHLNGRDSLVNPGPAMASHKDDEEKYFPQSGVLIFGKQDSGKTNVDIEKVMITDEEEIRTTNPVATEQYGSVSTNLQSGNTQAATSDVNTQGVLPGMVWQDRDVYLQGPIWAKIPHTDGHFHPSPPMGGFGLKHPPPQILIKNTPVPANPSTTFSAAKFASFITQYSTGQVSVEIEWELQKENSKRWNPEIQYTSNYNKSVNVDFTVDTNGVYSEPRPIGARYLTRNL

SEQ ID NO: 4832 - DNA, 2208 bp, Adeno-associated virus
atggctgccgatggttatcttccagattggctcgaggacaccctctctgaaggaataagacagtggtggaagctcaaacctggcccaccaccaccaaagcccgcagagcggcataaggacgacagcaggggtcttgtgcttcctgggtacaagtacctcggacccttcaacggactcgacaagggagagccggtcaacgaggcagacgccgcggccctcgagcacgacaaggcctacgaccggcagctcgacagcggagataacccgtacctcaagtacaaccacgccgacgcggagtttcaggagcgccttaaagaggatacgtcttttgggggcaacctcggacgagcagtcttccaggccaaaaagaggattcttgaacctctgggcctggttgaggaacctgttaagacggctccgggaaaaaagaggccggtagagcactctcctgcggagccagactcctcctcgggaaccggaaaagcgggccagcagcctgcaagaaagagattgaattttggtcagactggagacgcagactcagtacctgacccccggcctctcggacagccaccagcagccccctctggtctgggaactaatacgatggcttcaggcagtggcgcaccaatggcagacaataacgagggcgccgacggagtgggtaattcctcgggaaattggcattgcgattccacatggatgggcgacagagtcatcaccaccagcacccgcacctgggccctgcccacctacaacaaccatctgtacaagcaaatctccagccagtctggagccagcaacgacaaccactactttggctacagcaccccctgggggtattttgacttcaacagattccactgccacttctccccacgtgactggcaaagactcatcaacaacaactggggattccggcccaagagactcagcttcaagctctttaacattcaagtcaaagaggtcacgcagaatgacggtacgacgacgattgccaataaccttaccagcacggttcaggtgtttactgactcggagtaccagctcccgtacgtcctcggctcggcgcatcaaggatgcctcccgccgttcccagcagacgtcttcatggtgccacagtatggatacctcaccctgaacaacggcagtcaggcggtaggacgctcttccttttactgcctggagtactttccttctcagatgcttcgtaccggaaacaactttaccttcagctacacctttgaagacgttcctttccatagcagctacgctcacagccaaagtctggaccgtctcatgaatcctctcatcgaccagtacctgtattacttgagcagaacaaacactccaagcggaaccaccacgatgtccaggcttcagttttctcaggccggagcaagtgacattcgggaccagtctagaaactggcttcctggaccctgttaccgccagcagcgagtatcaaagacagctgcggacaacaacaacagtgattactcgtggactggagctaccaagtaccacctcaatggaagagactctctggtgaatccgggcccagctatggccagccacaaggacgatgaagaaaaatattttcctcagagcggggttctcatctttggaaaacaagactcgggaaaaactaatgtggacattgaaaaggttatgattacagacgaagaggaaatcaggaccaccaatcccgtggctacggagcagtatggttctgtatctaccaacctccagagcggcaacacacaagcagctacctcagatgtcaacacacaaggcgttcttccaggcatggtctggcaggacagagacgtgtacctgcaggggcccatctgggcaaagattccacacacggacggacattttcacccctctcccctcatgggcggattcggacttaaacaccctcctccacaaattctcatcaagaacaccccggtacctgcgaatccttcgaccactttcagtgcggcaaagtttgcttccttcatcacacagtactccacggggcaggtcagcgtggagatcgagtgggagctgcagaaggagaacagcaaacgctggaatcccgaaattcagtacacttccaactacaacaaatctgttaatgtggactttactgtggacactaatggtgtgtattcagagcctcgccccattggcaccagatacctgactcgtaatctgtaa

SEQ ID NO: 4833 - protein, 735 aa, Adeno-associated virus
MAADGYLPDWLEDTLSEGIRQWWKLKPGPPPPKPAERHKDDSRGLVLPGYKYLGPFNGLDKGEPVNEADAAALEHDKAYDRQLDSGDNPYLKYNHADAEFQERLKEDTSFGGNLGRAVFQAKKRILEPLGLVEEPVKTAPGKKRPVEHSPAEPDSSSGTGKAGQQPARKRLNFGQTGDADSVPDPRPLGQPPAAPSGLGTNTMASGSGAPMADNNEGADGVGNSSGNWHCDSTWMGDRVITTSTRTWALPTYNNHLYKQISSQSGASNDNHYFGYSTPWGYFDFNRFHCHFSPRDWQRLINNNWGFRPKRLSFKLFNIQVKEVTQNDGTTTIANNLTSTVQVFTDSEYQLPYVLGSAHQGCLPPFPADVFMVPQYGYLTLNNGSQAVGRSSFYCLEYFPSQMLRTGNNFTFSYTFEDVPFHSSYAHSQSLDRLMNPLIDQYLYYLSRTNTPSGTTTMSRLQFSQAGASDIRDQSRNWLPGPCYRQQRVSKTAADNNNSDYSWTGATKYHLNGRDSLVNPGPAMASHKDDEEKYFPQSGVLIFGKQDSGKTNVDIEKVMITDEEEIRTTNPVATEQYGSVSTNLQSGNTQAATSDVNTQGVLPGMVWQDRDVYLQGPIWAKIPHTDGHFHPSPLMGGFGLKHPPPQILIKNTPVPANPSTTFSAAKFASFITQYSTGQVSVEIEWELQKENSKRWNPEIQYTSNYNKSVNVDFTVDTNGVYSEPRPIGTRYLTRNL

SEQ ID NO: 4834 - DNA, 2208 bp, Adeno-associated virus
atggctgccgatggttatcttccagattggctcgaggacactctctctgaaggaataagacagtggtggaagctcaaacctggcccaccaccaccaaagcccgcagagcggcataaggacgacagcaggggtcttgtgcttcctgggtacaagtacctcggacccttcaacggactcgacaagggagagccggtcaacgaggcagacgccgcggccctcgagcacgacaaggcctacgaccggcagctcgacagcggagacaacccgtacctcaagtacaaccacgccgacgcggagtttcaggagcgccttaaaggagatacgtcttttgggggcaacctcggacgagcagtcttccaggccaaaaagaggattcttgaacctctgggcctggttgaggaacctgttaagacggctccgggaaaaaagaggccggtagagcactctcctgcggagccagactcctcctcgggaaccggaaaagcgggccagcagcctgcaagaaagagattgaattttggtcagactggagacgcagactcagtacctgacccccagcctctcggacagccaccagcagccccctctggtctgggaactaatacgatggcttcaggcagtggcgcaccaatggcagacaataacgagggcgccgacggagtgggtaattcctcgggaaattggcattgcgattccacatggatgggcggcagagtcatcaccaccagcacccgcacctgggccctgcccacctacaacaaccatctgtacaagcaaatctccagccagtctggagccagcaacgacaaccactactttggctacagcaccccctgggggtattttgacttcaacagattccactgccacttctccccacgtgactggcaaagactcatcaacaacaactggggattccggcccaagagactcagcttcaagctctttaacattcaagtcaaagaggtcacgcagaatgacggtacgacgacgattgccaataaccttaccagcacggttcaggtgtttactgactcggagtaccagctcccgtacgtcctcggctcggcgcatcaaggatgcctcccgccgttcccagcagacgtcttcatggtgccacagtatggatacctcaccctgaacaacggcagtcaggcggtaggacgctcttccttttactgcctggagtactttccttctcagacgcttcgtaccggaaacaactttaccttcagctacacctttgaagacgttcctttccatagcagctacgctcacagccaaagtctggaccgtctcatgaatcctctcatcgaccagtacctgtattacttgagcagaacaaacactccaagcggaaccaccacgatgtccaggcttcagttttctcaggccggagcaagtgacattcgggaccagtctagaaactggcttcctggaccctgttaccgccagcagcgagtatcaaagacagctgcggacaacaacaacagtgattactcgtggactggagctaccaagtaccacctcaatggaagagactctctggtgaatccgggcccagctatggccagccacaaggacgatgaagaaaaatattttcctcagagcggggttctcatctttggaaaacaagactcgggaaaaactaatgtggacattgaaaaggttatgattacagacgaagaggaaatcaggaccaccaatcccgtggctacggagcagtatggttctgtatctaccaacctccagagcggcaacacacaagcagctacctcagatgtcaacacacaaggcgttcttccaggcatggtctggcaggacagagacgtgtacctgcaggggcccatctgggcaaagattccacacacggacggacattttcacccctctcccctcatgggcggattcggacttaaacaccctcctccacaaattctcatcaagaacaccccggtacctgcgaatccttcgaccactttcagtgcggcaaagtttgcttccttcatcacacagtactccacggggcaggtcagcgtggagatcgagtgggagctgcagaaggagaacagcaaacgctggaatcccgaaattcagtacacttccaactacaacaaatctgttaatgtggactttactgtggacactaatggtgtgtattcagagcctcgccccattggcaccagatacctgactcgtaatctgtaa

SEQ ID NO: 4835 - protein, 735 aa, Adeno-associated virus
MAADGYLPDWLEDTLSEGIRQWWKLKPGPPPPKPAERHKDDSRGLVLPGYKYLGPFNGLDKGEPVNEADAAALEHDKAYDRQLDSGDNPYLKYNHADAEFQERLKGDTSFGGNLGRAVFQAKKRILEPLGLVEEPVKTAPGKKRPVEHSPAEPDSSSGTGKAGQQPARKRLNFGQTGDADSVPDPQPLGQPPAAPSGLGTNTMASGSGAPMADNNEGADGVGNSSGNWHCDSTWMGGRVITTSTRTWALPTYNNHLYKQISSQSGASNDNHYFGYSTPWGYFDFNRFHCHFSPRDWQRLINNNWGFRPKRLSFKLFNIQVKEVTQNDGTTTIANNLTSTVQVFTDSEYQLPYVLGSAHQGCLPPFPADVFMVPQYGYLTLNNGSQAVGRSSFYCLEYFPSQTLRTGNNFTFSYTFEDVPFHSSYAHSQSLDRLMNPLIDQYLYYLSRTNTPSGTTTMSRLQFSQAGASDIRDQSRNWLPGPCYRQQRVSKTAADNNNSDYSWTGATKYHLNGRDSLVNPGPAMASHKDDEEKYFPQSGVLIFGKQDSGKTNVDIEKVMITDEEEIRTTNPVATEQYGSVSTNLQSGNTQAATSDVNTQGVLPGMVWQDRDVYLQGPIWAKIPHTDGHFHPSPLMGGFGLKHPPPQILIKNTPVPANPSTTFSAAKFASFITQYSTGQVSVEIEWELQKENSKRWNPEIQYTSNYNKSVNVDFTVDTNGVYSEPRPIGTRYLTRNL

SEQ ID NO: 4836 - DNA, 2208 bp, Adeno-associated virus
atggctgccgatggttatcttccagattggctcgaggacactctctctgaaggaataagacagtggtggaagctcaaacctggcccaccaccaccaaagcccgcagagcggcataaggacgacagcaggggtcttgtgcttcctgggtacaagtacctcggacccttcaacggactcgacaagggagagccggtcaacgaggcagacgccgcggccctcgagcacgacaaggcctacgaccggcagctcgacagcggagacaacccgtacctcaagtacaaccacgccgacgcggagtttcaggagcgtcttaaagaagatacgtcttttgggggcaacctcggacgagcagtcttccaggccaaaaagaggattcttgaacctctgggcctggttgaggaacctgttaagacggctccgggaaaaaagaggccggtagagcactctcctgcggagccagactcctcctcgggaaccggaaaagcgggccagcagcctgcaagaaagagattgaattttggtcagactggagacgcagactcagtacctgacccccagcctctcggacagccaccagcagccccctctggtctgggaactaatacgatggcttcaggcagtggcgcaccaatggcagacaataacgagggcgccgacggagtgggtaattcctcgggaaattggcattgcgattccacatggatgggcgacagagtcatcaccaccagcacccgcacctgggccctgcccacctgcaacaaccatctgtacaagcaaatctccagccagtctggagccagcaacgacaaccactactttggctacagcaccccctgggggtattttgacttcaacagattccactgccacttctccccacgtgactggcaaagactcatcaacaacaactggggattccggcccaagagactcagcttcaagctctttaacattcaagtcaaagaggtcacgcagaatgacggtacgacgacgattgccaataaccttaccagcacggttcaggtgtttactgactcggagtaccagctcccgtacgtcctcggctcggcgcatcaaggatgcctcccgccgttcccagcagacgtcttcatggtgccacagtatggatacctcaccctgaacaacggcagtcaggcggtaggacgctcttccttttactgcctggagtattttccttctcagatgcttcgtaccggaaacaactttaccttcagctacacctttgaagacgttcctttccatagcagctacgctcacagccaaagtctggaccgtctcatgaatcctctcatcgaccagtacctgtattacttgagcagaacaaacactccaagcggaaccaccacgatgtccaggcttcagttttctcaggccggagcaagtgacattcgggaccagtctagaaactggcttcctggaccctgttaccgccagcagcgagtatcaaagacagctgcggacaacaacaacagtgattactcgtggactggagctaccaagtaccacctcaatggaagagactctctggtgaatccgggcccagctatggccagccacaaggacgatgaagaaaaatattttcctcagagcggggttctcatctttggaaaacaagactcgggaaaaactaatgtggacattgaaaaggttatgattacagacgaagaggaaatcaggaccaccaatcccgtggctacggagcagtatggttctgtatctacctacctccagagcggcaacacacaagcagctacctcagatgtcaacacacaaggcgttcttccaggcatggtctggcaggacagagacgtgtacctgcgggggcccatctgggcaaagattccacacacggacggacattttcacccctctcccctcatgggcggatttggacttaaacaccctcctccacaaattctcatcaagaacaccccggtacctgcgaatccttcgaccactttcagtgcggcaaagtttgcttccttcatcacacagtactccacggggcaggtcagcgtggagatcgagtgggagctgcagaaggagaacagcaaacgctggaatcccgaaattcagtacacttccaactacaacaaatctgttaatgtggactttactgtggacactaatggtgtgtattcagagcctcgccccattggcaccagatacctgactcgtaatctgtaa

SEQ ID NO: 4837 - protein, 735 aa, Adeno-associated virus
MAADGYLPDWLEDTLSEGIRQWWKLKPGPPPPKPAERHKDDSRGLVLPGYKYLGPFNGLDKGEPVNEADAAALEHDKAYDRQLDSGDNPYLKYNHADAEFQERLKEDTSFGGNLGRAVFQAKKRILEPLGLVEEPVKTAPGKKRPVEHSPAEPDSSSGTGKAGQQPARKRLNFGQTGDADSVPDPQPLGQPPAAPSGLGTNTMASGSGAPMADNNEGADGVGNSSGNWHCDSTWMGDRVITTSTRTWALPTCNNHLYKQISSQSGASNDNHYFGYSTPWGYFDFNRFHCHFSPRDWQRLINNNWGFRPKRLSFKLFNIQVKEVTQNDGTTTIANNLTSTVQVFTDSEYQLPYVLGSAHQGCLPPFPADVFMVPQYGYLTLNNGSQAVGRSSFYCLEYFPSQMLRTGNNFTFSYTFEDVPFHSSYAHSQSLDRLMNPLIDQYLYYLSRTNTPSGTTTMSRLQFSQAGASDIRDQSRNWLPGPCYRQQRVSKTAADNNNSDYSWTGATKYHLNGRDSLVNPGPAMASHKDDEEKYFPQSGVLIFGKQDSGKTNVDIEKVMITDEEEIRTTNPVATEQYGSVSTYLQSGNTQAATSDVNTQGVLPGMVWQDRDVYLRGPIWAKIPHTDGHFHPSPLMGGFGLKHPPPQILIKNTPVPANPSTTFSAAKFASFITQYSTGQVSVEIEWELQKENSKRWNPEIQYTSNYNKSVNVDFTVDTNGVYSEPRPIGTRYLTRNL

SEQ ID NO: 4838 - DNA, 2208 bp, Adeno-associated virus; identical to SEQ ID NO: 4832

SEQ ID NO: 4839 - protein, 735 aa, Adeno-associated virus; identical to SEQ ID NO: 4833

SEQ ID NO: 4840 - DNA, 2208 bp, Adeno-associated virus
atggctgccgatggttatcttccagattggctcgaggacactctctctgaaggaataagacagtggtggaagctcaaacctggcccaccaccaccaaagcccgcagagcggcataaggacggcagcaggggtcttgtgcttcctgggtacaagtacctcggacccttcaacggactcgacaagggagagccggtcaacgaggcagacgccgcggccctcgagcacgacaaggcctacgaccggcagctcaacagcggagacaacccgtacctcaagtacaaccacgccgacgcggagtttcaggagcgccttaaagaagatacgtcttttgggggcaacctcggacgagcagtcttccaggcaaaaaagagggttcttgaacctctgggcctggttgaggagcctgttaaaacggctccgggaaaaaagagaccggtagagcactctcctgcggagccagactcctcctcgggaaccggaaaagcgggccagcagcctgcaagaaagagattgaattttggtcagactggagacgcagactccgtacctgacccccagcctctcggacagccaccagcagccccctctggtctgggatctactacaatggctacaggcagtggcgcaccaatggcagacaataacgagggtgccgatggagtgggtaattcctcaggaaattggcattgcgattcccaatggctgggcgacagagtcatcaccacaagcactcgaacctgggccctgcccacctacaacaaccacctctacaagcaaatctccagccaatcaggagcctcaaacgacaaccactattttggctacagcaccccttgggggtattttgacttcaacagattccactgccacttttcaccacgtgactggcaaagactcatcaacaacaactggggattccgacccaagagactcaacttcaagctctttaacattcaagtcaaagaggtcacgcagaatgacggtacgacgacgattgccaataaccttaccagcacggttcaggtgtttactgactcggagtaccagctcccgtacgtcctcggctcggcgcatcaaggatgcctcccgccgttcccagcggacgtcttcatggtcccacagtatggatacctcaccctgaacaacgggagtcaggcggtaggacgctctcccttttactgcctggagtactttccttctcagatgctgcgtactggaaacaactttcagttcagctacacttttgaagacgtgcctttccacagcagctacgctcacagccagagtctggatcggctgatgaatcctctgatcgaccagtacctgtattatctgaacaagacacaaacaaatagtggaactcttcagcagtctcggctactgtttagccaagctggacccaccaacatgtctcttcaagctaaaaactggctgcctggaccttgctacagacagcagcgtctgtcaaagcaggcaaacgacaacaacaacagcaactttccctggactgcagctacaaagtatcatctaaatggccgggactcgttggttaatccaggaccagctatggccagtcacaaggatgacgaagaaaagtttttccccatgcatggaaccctgatatttggtaaacaaggaacaaatgccaacgacgcggatttggaaaatgtcatgattacagatgaagaagaaatcaggaccaccaatcccgtggctacggagcagtacgggactgtgtcaaataatttgcaaaactcaaacactggtccaactactggaactgtcaatcaccaaggagcgttacctggtatggtgtggcaggatcgagatgtgtaccttcagggacccatttgggccaagattcctcacaccgatggacactttcatccttctccactgatgggaggttttggactcaaacacccgcctcctcagattatgatcaaaaacactcccgttccagccaatcctcctacaaacttcagttctgccaagtttgcttctttcatcacacagtattccacggggcaggtcagcgtggagatcgagtgggagctgcagaaggagaacagcaaacgctggaatcccgaaattcagtacacttccaactacaacaaatctgttaatgtggactttactgtggacaataatggcgtgtactcagagcctcgccccattggcaccagatacctgactcgtaatctgtaa

SEQ ID NO: 4841 - protein, 735 aa, Adeno-associated virus
MAADGYLPDWLEDTLSEGIRQWWKLKPGPPPPKPAERHKDGSRGLVLPGYKYLGPFNGLDKGEPVNEADAAALEHDKAYDRQLNSGDNPYLKYNHADAEFQERLKEDTSFGGNLGRAVFQAKKRVLEPLGLVEEPVKTAPGKKRPVEHSPAEPDSSSGTGKAGQQPARKRLNFGQTGDADSVPDPQPLGQPPAAPSGLGSTTMATGSGAPMADNNEGADGVGNSSGNWHCDSQWLGDRVITTSTRTWALPTYNNHLYKQISSQSGASNDNHYFGYSTPWGYFDFNRFHCHFSPRDWQRLINNNWGFRPKRLNFKLFNIQVKEVTQNDGTTTIANNLTSTVQVFTDSEYQLPYVLGSAHQGCLPPFPADVFMVPQYGYLTLNNGSQAVGRSPFYCLEYFPSQMLRTGNNFQFSYTFEDVPFHSSYAHSQSLDRLMNPLIDQYLYYLNKTQTNSGTLQQSRLLFSQAGPTNMSLQAKNWLPGPCYRQQRLSKQANDNNNSNFPWTAATKYHLNGRDSLVNPGPAMASHKDDEEKFFPMHGTLIFGKQGTNANDADLENVMITDEEEIRTTNPVATEQYGTVSNNLQNSNTGPTTGTVNHQGALPGMVWQDRDVYLQGPIWAKIPHTDGHFHPSPLMGGFGLKHPPPQIMIKNTPVPANPPTNFSSAKFASFITQYSTGQVSVEIEWELQKENSKRWNPEIQYTSNYNKSVNVDFTVDNNGVYSEPRPIGTRYLTRNL

SEQ ID NO: 4842 - DNA, 2208 bp, Adeno-associated virus
atggctgccgatggttatcttccagattggctcgaggacactctctctgaaggaataagacagtggtggaagctcaaacctggcccaccaccaccaaagcccgcagagcggcataaggacgacagcaggggtcttgtgcttcctgggtacaagtacctcggacccttcaacggactcgacaagggagagccggtcaacgaggcagacgccgcggccctcgagcacgacaaggcctacgaccggcagctcgacagcggagacaacccgtacctcaagtacaaccacgccgacgcggagtttcaggagcgtcttaaagaagatacgtcttttgggggcaacctcggacgagcagtcttccaggccaaaaagaggattcttgaacctctgggcctggttgaggaacctgttaagacggctccgggaaaaaagaggccggtagagcactctcctgcggagccagactcctcctcgggaaccggaaaagcgggccagcagcctgcaagaaagagattgaattttggtcagactggagacgcagactcagtacctgacccccagcctctcggacagccaccagcagccccctctggtctgggaactaatacgatggcttcaggcagtggcgcaccaatggcagacaataacgagggcgccgacggagtgggtaattcctcgggaaattggcattgcgattccacatggatgggcgacagagtcatcaccaccagcacccgcacctgggccctgcccacctacaacaaccatctgtacaagcaaatctccagccagtctggagccagcaacgacaaccactactttggctacagcaccccctgggggtattttgacttcaacagattccactgccacttctccccacgtgactggcaaagactcatcaacaacaactggggattccggcccaagagactcagcttcaagctctttaacattcaagtcaaagaggtcacgcagaatgacggtacgacgacgattgccaataaccttaccagcacggttcaggtgtttactgactcggagtaccagctcccgtacgtcctcggctcggcgcatcaaggatgcctcccgccgttcccagcagacgtcttcatggtgccacagtatggatacctcaccctgaacaacggcagtcaggcggtaggacgctcttccttttactgcctggagtactttccttctcagatgcttcgtaccggaaacaactttaccttcagctacacctttgaagacgttcctttccatagcagctacgctcacagccaaagtctggaccgtctcatgaatcctctcatcgaccagtacctgtattacttgagcagaacaaacactccaagcggaaccaccacgatgtccaggcttcagttttctcaggccggagcaagtgacattcgggaccagtctagaaactggcttcctggaccctgttaccgccagcagcgagtatcaaagacagctgcggacaacaacaacagtgattactcgtggactggagctaccaagtaccacctcaatggaagagactctctggtgaatccgggcccagctatggccagccacaaggacgatgaagaaaaatattttcctcagagcggggttctcatctttggaaaacaagactcgggaaaaactaatgtggacattgaaaaggttatgattacagacgaagaggaaatcaggaccaccaatcccgtggctacggagcagtatggttctgtatctaccaacctccagagcggcaacacacaagcagctacctcagatgtcaacacacaaggcgttcttccaggcatggtctggcaggacagagacgtgtacctgcaggggcccatctgggcaaagattccacacacggacggacattttcacccctctcccctcatgggcggattcggacttaaacaccctcctccacaaattctcatcaagaacaccccggtacctgcgaatccttcgaccactttcagtgcggcaaagtttgcttccttcatcacacagtactccacggggcaggtcagcgtggagatcgagtgggagctgcagaaggagaacagcaaacgctggaatcccgaaattcagtacacttccaactacaacaaatctgttaatgtggactttactgtggacactaatggtgtgtattcagagcctcgccccattggcaccagatacctgactcgtaatctgtaa

SEQ ID NO: 4843 - protein, 735 aa, Adeno-associated virus
MAADGYLPDWLEDTLSEGIRQWWKLKPGPPPPKPAERHKDDSRGLVLPGYKYLGPFNGLDKGEPVNEADAAALEHDKAYDRQLDSGDNPYLKYNHADAEFQERLKEDTSFGGNLGRAVFQAKKRILEPLGLVEEPVKTAPGKKRPVEHSPAEPDSSSGTGKAGQQPARKRLNFGQTGDADSVPDPQPLGQPPAAPSGLGTNTMASGSGAPMADNNEGADGVGNSSGNWHCDSTWMGDRVITTSTRTWALPTYNNHLYKQISSQSGASNDNHYFGYSTPWGYFDFNRFHCHFSPRDWQRLINNNWGFRPKRLSFKLFNIQVKEVTQNDGTTTIANNLTSTVQVFTDSEYQLPYVLGSAHQGCLPPFPADVFMVPQYGYLTLNNGSQAVGRSSFYCLEYFPSQMLRTGNNFTFSYTFEDVPFHSSYAHSQSLDRLMNPLIDQYLYYLSRTNTPSGTTTMSRLQFSQAGASDIRDQSRNWLPGPCYRQQRVSKTAADNNNSDYSWTGATKYHLNGRDSLVNPGPAMASHKDDEEKYFPQSGVLIFGKQDSGKTNVDIEKVMITDEEEIRTTNPVATEQYGSVSTNLQSGNTQAATSDVNTQGVLPGMVWQDRDVYLQGPIWAKIPHTDGHFHPSPLMGGFGLKHPPPQILIKNTPVPANPSTTFSAAKFASFITQYSTGQVSVEIEWELQKENSKRWNPEIQYTSNYNKSVNVDFTVDTNGVYSEPRPIGTRYLTRNL

SEQ ID NO: 4844 - DNA, 2208 bp, Adeno-associated virus
atggctgccgatggttatcttccagattggctcgaggacactctctctgaaggaataagacagtggtggaagctcaaacctggcccaccaccaccaaagcccgcagagcggcataaggacgacagcaggggtcttgtgcttcctgggtacaagtacctcggacccttcaacggactcgacaagggagagccggtcaacgaggcagacgccgcggccctcgagcacgacaaggcctacgaccggcagctcgacagcggagacaacccgtacctcaagtacaaccacgccgacgcggagtttcaggagcgtcttaaagaagatacgtcttttgggggcaacctcggacgagcagtcttccaggccaaaaagaggattcttgaacctctgggcctggttgaggaacctgttaagacggctccgggaaaaaagaggccggtagagcactctcctgcggagccagactcctcctcgggaaccggaaaagcgggccagcagcctgcaagaaagagattgaattttggtcagactggagacgcagactcagtacctgacccccagcctctcggacagccaccagcagccccctctggtctgggaactaatacgatggcttcaggcagtggcgcaccaatggcagacaataacgagggcgccgacggagtgggtaattcctcgggaaattggcattgcgattccacatggatgggcgacagagtcatcaccaccagcacccgcacctgggccctgcccacctacaacaaccatctgtacaagcaaatctccagccagtctggagccagcaacgacaaccactactttggctacagcaccccctgggggtatttcgacttcaacagattccactgccacttctccccacgtgactggcaaagactcatcaacaacaactggggattccggcccaagagactcagcttcaagctctttaacattcaagtcaaagaggtcacgcagaatgacggtacgacgacgattgccaataaccttaccagcacggttcaggtgtttactgactcggggtaccagctcccgtacgtcctcggctcggcgcatcaaggatgccttccgccgttcccagcagacgtcttcatggtgccacagtatggatacctcaccctgaacaacggcagtcaggcggtaggacgctcttccttttactgcctggagtactttccttctcagatgcttcgtaccggaaacaactttaccttcagctacacctttgaagacgttcctttccatagcagctacgctcacggccaaagtctggaccgtctcatgaatcctctcatcgaccagtacctgtattacttgagcagaacaaacactccaagcggaaccaccacgatgtccaggcttcagttttctcaggccggagcaagtgacgttcgggaccagtctagaaactggcttcctggaccctgttaccgccagcagcgagtatcaaagacagctgcggacaacaacaacagtgattactcgtggactggagctaccaagtaccacctcaatggaagagactctctggtgaatccgggcccagctatggccagccacaaggacgatgaagaaaaatattttcctcagagcggggttctcgtctttggaaaacaagactcgggaaaaactaatgtggacattgaaaaggttatgattacagacgaagaggaaatcaggaccaccaatcccgcggctacggagcagtatggttctgtatctaccaacctccagagcggcaacacacaagcagctacctcagatgtcaacacacaaggcgttcttccaggcatggtctggcaggacagagacgtgtacctgcaggggcccatctgggcaaagattccacacacggacggacattttcacccctctcccctcatgggcggattcggacttaaacaccctcctccacaaattctcatcaagaacaccccggtacctgcgaatccttcgaccactttcagtgcggcaaagtttgtttccttcatcacacagtactccacggggcaggtcagcgtggagatcgagtgggagctgcagaaggagaacagcaaacgctggaatcccgaaattcagtacacttccaactacaacaaatctgttaatgtggactttactgtggacactaatggtgtgtattcagagcctcgccccattggcaccagatacctgactcgtaatctgtaa

SEQ ID NO: 4845 - protein, 735 aa, Adeno-associated virus
MAADGYLPDWLEDTLSEGIRQWWKLKPGPPPPKPAERHKDDSRGLVLPGYKYLGPFNGLDKGEPVNEADAAALEHDKAYDRQLDSGDNPYLKYNHADAEFQERLKEDTSFGGNLGRAVFQAKKRILEPLGLVEEPVKTAPGKKRPVEHSPAEPDSSSGTGKAGQQPARKRLNFGQTGDADSVPDPQPLGQPPAAPSGLGTNTMASGSGAPMADNNEGADGVGNSSGNWHCDSTWMGDRVITTSTRTWALPTYNNHLYKQISSQSGASNDNHYFGYSTPWGYFDFNRFHCHFSPRDWQRLINNNWGFRPKRLSFKLFNIQVKEVTQNDGTTTIANNLTSTVQVFTDSGYQLPYVLGSAHQGCLPPFPADVFMVPQYGYLTLNNGSQAVGRSSFYCLEYFPSQMLRTGNNFTFSYTFEDVPFHSSYAHGQSLDRLMNPLIDQYLYYLSRTNTPSGTTTMSRLQFSQAGASDVRDQSRNWLPGPCYRQQRVSKTAADNNNSDYSWTGATKYHLNGRDSLVNPGPAMASHKDDEEKYFPQSGVLVFGKQDSGKTNVDIEKVMITDEEEIRTTNPAATEQYGSVSTNLQSGNTQAATSDVNTQGVLPGMVWQDRDVYLQGPIWAKIPHTDGHFHPSPLMGGFGLKHPPPQILIKNTPVPANPSTTFSAAKFVSFITQYSTGQVSVEIEWELQKENSKRWNPEIQYTSNYNKSVNVDFTVDTNGVYSEPRPIGTRYLTRNL

SEQ ID NO: 4846 - DNA, 2208 bp, Adeno-associated virus
atggctgccgatggttatcttccagattggctcgaggacactctctctgaaggaataagacagtggtggaaactcaaacctggcccaccaccaccaaagcccgcagagcggcataaggacgacagcaggggtcttgtgcttcctgggtacaagtacctcggacccttcaacggactcgacaagggagagccggtcaacgaggcagacgccgcggccctcgagcacgacaaggcctacgaccggcagctcgacagcggagacaacccgtacctcaagtacaaccacgccgacgcggagtttcaggagcgccttaaagaagatacgtcttttgggggcaacctcggacgagcagtcttccaggcaaaaaagagggttctggaacctctgagcctggttgaggagcctgttaagacggctccgggaaaaaagaggccggtagagcactctcccgcagagccagattcctcctccggaactggaaagtcgggcaaccagcctgcaagaaagagattgaatttcggtcagactggagactcagactccgtacctgacccccagcctctcggacagccaccagcagccccctctggtctgggaactaatacgatggctacaggcagtggcgcaccaatggcagacaataacgagggcgccgacggagtgggtaattcctcgggaaattggcattgcgattccacatggatgggcgacagagtcatcaccaccagcacccgaacctgggccctgcccacctacaacaaccatctgtacaagcaaatatccagccagtctggagccagcaacgacaatcactactttggctacagcaccccctgggggtattttgacttcaacagattccactgccacttttcaccacgtgactggcaaagactcatcaacaacaactggggattccgacccaagagactcaacttcaagctctttaacattcaagtcaaagaggtcacgcagaatgacggtacgacgacgattgccaataaccttaccagcacggttcaggtgtttactgactcggagtaccagctcccgtacgtcctcggctcggcgcatcaaggatgcctcccgccgttcccagcagacgtcttcatggtgccacagtatggatacctcaccctgaacaacgggagtcaggcagtaggacgctcttcattttactgcctagagtactttccttctcagatgctgcgtaccggaaacaactttaccttcagctacacctttgaggacgttcctttccacagcagctacgctcacagccagagtttggaccgtctcatgaatcctctcatcgaccagtacctgtattacttgagcagaacaaacactccaagcggaaccaccacgcagtccaggcttcagttttctcaggccggagcgagtgacattcaggaccagtctaggaactggcttcctggaccctgttaccgtcagcagcgagtatcaaagacatctgcggataacaacaacagtgaatactcgtggactggagctaccaagtaccacctcaatggcagagactctctggtgaatccgggcccggccatggccagccacaaagacgatgaagaaaagttttttcctcagagcggggttcttatctttgggaagcaaggctcagagaaaacaaatgtggatattgaaaaggtcatgattacagacgaagaggaaatcaggaccaccaatcccgtggctacggagcagtatggttctgtatctaccaacctccagagcggcaacacacaagcagctaccgcagatgtcaacacacaaggcgttcttccaggcatggtcgggcaagacagagacgtgtacctgcaggggcctacttgggcaaagattccacacacggacggacattttcacccctctcccctcatgggcggatttggacttaaacaccctcctccacagattctcatcaagaacaccccggtacctgcgaatccttcgaccaccttcagtgcggcaaagtttgcttccttcattacacagtactccacggggcaggtcagcgtggagatcgagtgggagctgcagaaggagaacagcaaacgctggaatcccgagatccagtacacttccaactacaacaagtctgttaatgtggactttactgtggacactaatggcgtgtattcagagcctcgccccattggcaccagatacctgactcgtaatctgtaa

SEQ ID NO: 4847 - protein, 735 aa, Adeno-associated virus
MAADGYLPDWLEDTLSEGIRQWWKLKPGPPPPKPAERHKDDSRGLVLPGYKYLGPFNGLDKGEPVNEADAAALEHDKAYDRQLDSGDNPYLKYNHADAEFQERLKEDTSFGGNLGRAVFQAKKRVLEPLSLVEEPVKTAPGKKRPVEHSPAEPDSSSGTGKSGNQPARKRLNFGQTGDSDSVPDPQPLGQPPAAPSGLGTNTMATGSGAPMADNNEGADGVGNSSGNWHCDSTWMGDRVITTSTRTWALPTYNNHLYKQISSQSGASNDNHYFGYSTPWGYFDFNRFHCHFSPRDWQRLINNNWGFRPKRLNFKLFNIQVKEVTQNDGTTTIANNLTSTVQVFTDSEYQLPYVLGSAHQGCLPPFPADVFMVPQYGYLTLNNGSQAVGRSSFYCLEYFPSQMLRTGNNFTFSYTFEDVPFHSSYAHSQSLDRLMNPLIDQYLYYLSRTNTPSGTTTQSRLQFSQAGASDIQDQSRNWLPGPCYRQQRVSKTSADNNNSEYSWTGATKYHLNGRDSLVNPGPAMASHKDDEEKFFPQSGVLIFGKQGSEKTNVDIEKVMITDEEEIRTTNPVATEQYGSVSTNLQSGNTQAATADVNTQGVLPGMVGQDRDVYLQGPTWAKIPHTDGHFHPSPLMGGFGLKHPPPQILIKNTPVPANPSTTFSAAKFASFITQYSTGQVSVEIEWELQKENSKRWNPEIQYTSNYNKSVNVDFTVDTNGVYSEPRPIGTRYLTRNL

SEQ ID NO: 4848 - DNA, 2208 bp, Adeno-associated virus
atggctgccgatggttatcttccagattggctcgaggacactctctctgaaggaataagacagtggtggaagctcaaacctggcccaccaccaccaaagcccgcagagcggcataaggacgacagcaggggtcttgtgcttcctgggtacaagtacctcggacccttcaacggactcgacaagggagagccggtcaacgaggcagacgccgcggccctcgagcacgacaaggcctacgaccggcagctcgacagcggagacaacccgtacctcaagtacaaccacgccgacgcagagtttcaggagcgccttaaagaagatacgtcttttgggggcaacctcggacgagcagtcttccaggcaaaaaagagggttctggaacctctgggcctggttgaggagcctgttaagacggctccgggaaaaaagaggccggtagagcactctcctgcagagccagattcctcctccggaactggaaagtcgggcaaccagcctgcaagaaagagattgaatttcggtcagactggagactcagactccgtacctgacccccagcctctcggacagccaccagcagccccctctggtctgggaactaatacgatggctacaggcagtggcgcaccaatggcagacaataacgagggcgccgacggagtgggtaattcctcgggaaattggcattgcgattccacatggatgggcgacagagtcatcaccaccagcacccgaacctgggccctgcccacctacaacaaccatctgtacaagcaaatatccagccagtctggagccagcaacgacaatcactactttggctacagcaccccctgggggtattttgacttcaacagattccactgccacttttcaccacgtgactggcaaagactcatcaacaacaactggggattccgacccaagagactcaacttcaagctctttaacattcaagtcaaagaggtcacgcagaatgacggtacgacgacgattgccaataaccttaccagcacggttcaggtgtttactgactcggagtaccagctcccgtacgtcctcggctcggcgcatcaaggatgcctcccgccgttcccagcagacgtcttcatggtgccacagtatggatacctcaccctgaacaacgggagtcaggcagtaggacgctcttcattttactgcctagggtactttccttctcagatgctgcgtaccggaaacaactttaccttcagctacacctttgaggacgttcctttccacagcagctacgctcacagccagagtttggaccgtctcatgaatcctctcatcgaccagtacctgtattacttgagcagaacaaacactccaagcggaaccaccacgcagtccaggcttcagttttctcaggccggagcgagtgacattcgggaccagtctaggaactggcttcctggaccctgttaccgtcagcagcgagtatcaaagacatctgcggataacaacaacagtgaatactcgtggactggagctaccaagtaccacctcaatggcagagactctctggtgaatccgggcccggccatggccagccacaaagacgatgaagaaaagttttttcctcagagcggggttcttatctttgggaagcaaggcccagagaaaacaaatgtggatattgaaaaggtcatgattacagacgaagaggaaatcaggaccaccaatcccgtggctacggagcagtatggttctgtatctaccaacctccagagcggcaacacacaagcagctaccgcagatgtcaacacacaaggcgttcttccaggcatggtctggcaagacagagacgtgtacctgcaggggcctatttgggcaaagattccacacacggacggacattttcacccctctcccctcatgggcggatttggacttaaacaccctcctccacagattctcatcaagaacaccccggtacctgcgaatccttcgaccaccttcagtgcggcaaagtttgcttccttcattacacagtactccacggggcaggtcagcgtggagatcgagtgggagctgcagaaggagaacagcaaacgctggaatcccgagatccagtacacttccaactacaacaagtctgttaatgtggactttactgtggacactaatggcgtgtattcagagcctcgccccattggcaccagatacctgactcgtaatctgtaa

SEQ ID NO: 4849 - protein, 735 aa, Adeno-associated virus
MAADGYLPDWLEDTLSEGIRQWWKLKPGPPPPKPAERHKDDSRGLVLPGYKYLGPFNGLDKGEPVNEADAAALEHDKAYDRQLDSGDNPYLKYNHADAEFQERLKEDTSFGGNLGRAVFQAKKRVLEPLGLVEEPVKTAPGKKRPVEHSPAEPDSSSGTGKSGNQPARKRLNFGQTGDSDSVPDPQPLGQPPAAPSGLGTNTMATGSGAPMADNNEGADGVGNSSGNWHCDSTWMGDRVITTSTRTWALPTYNNHLYKQISSQSGASNDNHYFGYSTPWGYFDFNRFHCHFSPRDWQRLINNNWGFRPKRLNFKLFNIQVKEVTQNDGTTTIANNLTSTVQVFTDSEYQLPYVLGSAHQGCLPPFPADVFMVPQYGYLTLNNGSQAVGRSSFYCLGYFPSQMLRTGNNFTFSYTFEDVPFHSSYAHSQSLDRLMNPLIDQYLYYLSRTNTPSGTTTQSRLQFSQAGASDIRDQSRNWLPGPCYRQQRVSKTSADNNNSEYSWTGATKYHLNGRDSLVNPGPAMASHKDDEEKFFPQSGVLIFGKQGPEKTNVDIEKVMITDEEEIRTTNPVATEQYGSVSTNLQSGNTQAATADVNTQGVLPGMVWQDRDVYLQGPIWAKIPHTDGHFHPSPLMGGFGLKHPPPQILIKNTPVPANPSTTFSAAKFASFITQYSTGQVSVEIEWELQKENSKRWNPEIQYTSNYNKSVNVDFTVDTNGVYSEPRPIGTRYLTRNL

SEQ ID NO: 4850 - protein, 735 aa, Adeno-associated virus
MAADGYLPDWLEDTLSEGIRQWWKLKPGPPPPKPAERHKDDSRGLVLPGYKYLGPFNGLDKGEPVNEADAAALEHDKAYDRQLDSGDNPYLKYNHADAEFQERLKEDTSFGGNLGRAVFQAKKRVLEPLGLVEEPVKTAPGKKRPVEHSPAEPDSSSGTGKSGNQPARKRLNFGQTGDSDSVPDPQPLGQPPAAPSGLGTNTMATGSGAPMADNNEGADGVGNSSGNWHCDSTWMGDRVITTSTRTWALPTYNNHLYKQISSQSGASNDNHYFGYSTPWGYFDFNRFHCHFSPRDWQRLINNNWGFRPKRLNFKLFNIQVKEVTQNDGTTTIANNLTSTVQVFTDSEYQLPYVLGSAHQGCLPPFPADVFMVPQYGYLTLNNGSQAVGRSSFYCLEYFPSQMLRTGNNFTFSYTFEDVPFHSSYAHSQSLDRLMNPLIDQYLYYLSRTNTPSGTTTQSRLQFSQAGASDIRDQSRNWLPGPCYRQQRVSKTSADNNNSEYSWTGATKYHLNGRDSLVNPGPAMASHKDDEEKFFPQSGVLIFGKQGPEKTNVDIEKVMITDEEEIRTTNPVATEQYGSVSTNLQSGNTQAATADVNTQGVLPGMVWQDRDVYLQGPIWAKIPHTDGHFHPSPLMGGFGLKHPPPQILIKNTPVPANPSTTFSAAKFASFITQYSTGQVSVEIEWELQKENSKRWNPEIQYTSNYNKSVNVDFTVDTNGVYSEPRPIGTRYLTRNL

SEQ ID NO: 4851 - protein, 735 aa, Adeno-associated virus; identical to SEQ ID NO: 4850

SEQ ID NO: 4852 - DNA, 2211 bp, Adeno-associated virus
atggctgccgatggttatcttccagattggctcgaggacactctctctgaaggaataagacagtggtggaagctcaaacctggcccaccaccaccaaagcccgcagagcggcataaggacgacagcaggggtcttgtgcttcctgggtacaagtacctcggacccttcaacggactcgacaagggggagccggtcaacgaggcagacgccgcggccctcgagcacgacaaggcctacgaccggcagctcgacagcggagacaacccgtacctcaagtacaaccacgccgacgcagagtttcaggagcgccttaaagaagatacgtcttttgggggcaacctcggacgagcagtcttccaggcgaaaaagagggttcttgaacctctgcggcctggtttgaggaaacctgttaagacggctccgggaaaaaagaggccggtagagcactctcctgtggagccagactcctcctcgggaaccggaaaagcgggccagcagcctgcaagaaaaagattaaattttggtcagactggagacgcagactccgtacctgacccccagcctctcggacagccaccagcagccccctctggtctgggatctactacaatggctacaggcagtggcgcaccaatggcagacaataacgagggtgccgatggagtgggtaattcctcaggaaattggcattgcgattcccaatggctggacgacagagtcatcgccaccagcacccgaacctgggccctgcccacatacaacaaccacctctacaagcaaatctccagccaatcaggagcctgcaacgacaaccactactttggctacagcaccccctgggggtattttgacttcaacagattccactgccacttttcaccacgtgactggcaaagactcatcaacagcaactggggattccggcccaaaagactcaacttcaagctctttaatattcaagtcaaagaggtcacgcagaatgacggtacgacgacgattgccaataaccttaccagcacggttcaggtgtttactgactcggagtaccagctcccgtacgtcccgggctcggcgcatcaaggatgcctcccgccgtttccagcggacgtcttcatggtcccacagtatggatacctcaccctgaacaacgggagtcaggcggtaggacgctcttccttttactgcctggagtactttccttctcagatgctgcgtactggaaacaactttcagttcagctacacttttgaagacgtgcctttccacagcagctacgctcactgccagagtctggatcggctgatgaatcctctgatcgaccagtacctgtattatctgaacaagacacaaacaaatagtggaactcttcagcagtctcggctactgtttagccaagctggaccaaccaacatgtctcttcaagctaaaaactggctgcctggaccttgctacagacagcagcgtctgtcaaaacaggcaaacgacaataacaactgcaactttccctggactgcagctacaaagtatcatctaaatggccgggactcgttggttaatccaggaccagctatggccagtcacaaggatgacgaagaaaagtttttccccatgcatggaaccctgatatttggtaaacaaggaacaaatgccaacgacgcggatttggaaaatgtcatgattacagatgaagaagaaatcaggcccaccaatcccgtggctacggagcagtacgggactgtgtcaaataatttgcaaaactcaaacactggtccaactacaggaactgtcaatcaccaaggagcgttacctggtatggtgtggcaggatcgagacgtgtacctgcagggacccatttgggccaagattcctcacaccgatggacactttcatccttctccactgatgggaggttttggactcaaacacccgcctcctcagatcatgatcaaaagcactcccgttccagccaatcctcccacaaacttcagttctgccaagtttgcttcttccatcacacagtattccacgggacaggtcagcgtggagatcgagtgggagctgcagaaggagaacagcaaacgctggaatcccgaaattcagtacacttccaactacaacaagtctgttaatgtggactttactgtggacactaatggtgtgtattcagagcctcgccccattggcaccagatacctgactcgtaatctgtaa

SEQ ID NO: 4853 - protein, 736 aa, Adeno-associated virus
MAADGYLPDWLEDTLSEGIRQWWKLKPGPPPPKPAERHKDDSRGLVLPGYKYLGPFNGLDKGEPVNEADAAALEHDKAYDRQLDSGDNPYLKYNHADAEFQERLKEDTSFGGNLGRAVFQAKKRVLEPLRPGLRKPVKTAPGKKRPVEHSPVEPDSSSGTGKAGQQPARKRLNFGQTGDADSVPDPQPLGQPPAAPSGLGSTTMATGSGAPMADNNEGADGVGNSSGNWHCDSQWLDDRVIATSTRTWALPTYNNHLYKQISSQSGACNDNHYFGYSTPWGYFDFNRFHCHFSPRDWQRLINSNWGFRPKRLNFKLFNIQVKEVTQNDGTTTIANNLTSTVQVFTDSEYQLPYVPGSAHQGCLPPFPADVFMVPQYGYLTLNNGSQAVGRSSFYCLEYFPSQMLRTGNNFQFSYTFEDVPFHSSYAHCQSLDRLMNPLIDQYLYYLNKTQTNSGTLQQSRLLFSQAGPTNMSLQAKNWLPGPCYRQQRLSKQANDNNNCNFPWTAATKYHLNGRDSLVNPGPAMASHKDDEEKFFPMHGTLIFGKQGTNANDADLENVMITDEEEIRPTNPVATEQYGTVSNNLQNSNTGPTTGTVNHQGALPGMVWQDRDVYLQGPIWAKIPHTDGHFHPSPLMGGFGLKHPPPQIMIKSTPVPANPPTNFSSAKFASSITQYSTGQVSVEIEWELQKENSKRWNPEIQYTSNYNKSVNVDFTVDTNGVYSEPRPIGTRYLTRNL

SEQ ID NO: 4854 - DNA, 2208 bp, Adeno-associated virus
atggctgccgatggttatcttccagattggctcgaggacactctctctgaaggaataagacagtggtggaagctcaaacctggcccaccaccaccaaagcccgcagagcggcataaggacgacagcaggggtcttgtgcttcctgggtacaagtacctcggacccttcaacggactcgacaagggagagccggtcaacgaggcagacgccgcggccctcgagcacgacaaggcctacgaccggcagctcgacagcggagacaacccgtacctcaagtacaaccacgccgacgcggagtttcaggagcgccttaaagaggatacgtcttttgggggcaacctcggacgagcagtcttccaggcaaaaaagagggttctggaacctctgggcctggttgaggagcctgttaagacggctccgggaaaaaagaggccggtagagcactctcctgcagagccagattcctcctccggaactggaaagtcgggcaaccagcctgcaagaaagagattgaatttcggtcagactggagactcagactccgtacctgacccccagcctctcggacagccaccagcagccccctctggtctgggaactaatacgatggctacaggcagtggcgcaccaatggcagacaataacgagggcgccgacggagtgggtaattcctcgggaaattggcattgcgattccacatggatgggcgacagagtcatcaccaccagcacccgaacctgggccctgcccacctacaacaaccatctgtacaagcaaatatccagccagtctggagccagcaacgacaatcactactttggctacagcaccccctgggggtattttgacttcaacagattccactgccacttttcaccacgtgactggcaaagactcatcaacaacaactggggattccgacccaagagactcaacttcaagctctttaacattcaagtcaaagaggtcacgcagaatgacggtacgacgacgattgccaataaccttaccagcacggttcaggtgtttactgactcggagtaccagctcccgtacgtcctcggctcggcgcatcaaggatgcctcccgccgttcccagcagacgtcttcatggtgccacagtatggatacctcaccctgaacaacgggagtcaggcagtaggacgctcttcattttactgcctagagtactttccttctcagatgctgcgtaccggaaacagctttaccttcagctacacctttgaggacgttcctttccacagcagctacgctcacagccagagtttggaccgtctcatgaatcctctcatcgaccagtacctgtattacttgagcagaacaaacactccaagcggaaccaccacgcagtccaggcttcagttttctcaggccggagcgagtgacattcgggaccagtctaggaactggcttcctggaccctgttaccgtcagcagcgagtatcaaagacatctgcggataacaacaacagtgaatactcgtggactggagctaccaagtaccacctcaatggcagagactctctggtgaatccgggcccggccatggccagccacaaagacgatgaagaaaagttctttcctcagagcggggttcttatctttgggaagcaaggctcagagaaaacaaatgtggatattgaaaaggtcatgattacagacgaagaggaaatcaggaccaccaatcccgtggctacggagcagtatggttctgtatctaccaacctccagagcggcaacacacaagcagctaccgcagatgtcaacacacaaggcgttcttccaggcatggtctggcaagacagagacgtgtacctgcaggggcctatttgggcaaagattccacacacggacggacattttcacccctctcccctcatgggcggatttggacttaaacaccctcctccacagattctcatcaagaacaccccggtacctgcgaatccttcgaccaccttcagtgcggcaaagtttgcttccttcattacacagtactccacggggcaggtcagcgtggagatcgagtgggagctgcagaaggagaacagcaaacgctggaatcccgagatccagtacacttccaactacaacaagtctgttaatgtggactttactgtggacactaatggcgtgtattcagagcctcgccccattggcaccagatacctgactcgtaatctgtaa

SEQ ID NO: 4855 - protein, 735 aa, Adeno-associated virus
MAADGYLPDWLEDTLSEGIRQWWKLKPGPPPPKPAERHKDDSRGLVLPGYKYLGPFNGLDKGEPVNEADAAALEHDKAYDRQLDSGDNPYLKYNHADAEFQERLKEDTSFGGNLGRAVFQAKKRVLEPLGLVEEPVKTAPGKKRPVEHSPAEPDSSSGTGKSGNQPARKRLNFGQTGDSDSVPDPQPLGQPPAAPSGLGTNTMATGSGAPMADNNEGADGVGNSSGNWHCDSTWMGDRVITTSTRTWALPTYNNHLYKQISSQSGASNDNHYFGYSTPWGYFDFNRFHCHFSPRDWQRLINNNWGFRPKRLNFKLFNIQVKEVTQNDGTTTIANNLTSTVQVFTDSEYQLPYVLGSAHQGCLPPFPADVFMVPQYGYLTLNNGSQAVGRSSFYCLEYFPSQMLRTGNSFTFSYTFEDVPFHSSYAHSQSLDRLMNPLIDQYLYYLSRTNTPSGTTTQSRLQFSQAGASDIRDQSRNWLPGPCYRQQRVSKTSADNNNSEYSWTGATKYHLNGRDSLVNPGPAMASHKDDEEKFFPQSGVLIFGKQGSEKTNVDIEKVMITDEEEIRTTNPVATEQYGSVSTNLQSGNTQAATADVNTQGVLPGMVWQDRDVYLQGPIWAKIPHTDGHFHPSPLMGGFGLKHPPPQILIKNTPVPANPSTTFSAAKFASFITQYSTGQVSVEIEWELQKENSKRWNPEIQYTSNYNKSVNVDFTVDTNGVYSEPRPIGTRYLTRNL

SEQ ID NO: 4856 - DNA, 2211 bp, Adeno-associated virus; identical to SEQ ID NO: 4767

SEQ ID NO: 4857 - protein, 736 aa, Adeno-associated virus
MAADGYLPDWLEDTLSEGIRQWWKLKPGPPPPKPAERHKDDSRGLVLPGYKYLGPGNGLDKGEPVNAADAAALEHDKAYDQQLKAGDNPYLKYNHADAEFQERLKEDTSFGGNLGRAVFQAKKRLLEPLGLVEEAAKTAPGKKRPVEQSPQEPDSSAGIGKSGSQPAKKKLNFGQTGDTESVPDPQPIGEPPAAPSGVGSLTMASGGGAPVADNNEGADGVGSSSGNWHCDSQWLGDRVITTSTRTWALPTYNNHLYKQISNSTSGGSSNDNAYFGYSTPWGYFDFNRFHCHFSPRDWQRLINNNWGFRPKRLNFKLFNIQVKEVTDNNGVKTIANNLTSTVQVFTDSDYQLPYVLGSAHEGCLPPFPADVFMIPQYGYLTLNDGGQAVGRSSFYCLEYFPSQMLRTGNNFQFSYEFENVPFHSSYAHSQSLDRLMNPLIDQYLYYLSKTINGSGQNQQTLKFSVAGPSNMAVQGRNYIPGPSYRQQRVSTTVTQNNNSEFAWPGASSWALNGRNSLMNPGPAMASHKEGEDRFFPLSGSLIFGKQGTGRDNVDADKVMITNEEEIKTTNPVATESYGQVATNHQSAQAQAQTGWVQNQGILPGMVWQDRDVYLQGPIWAKIPHTDGNFHPSPLMGGFGMKHPPPQILIKNTPVPADPPTAFNKDKLNSFITQYSTGQVSVEIEWELQKENSKRWNPEIQYTSNYYKSNNVEFAVSTEGVYSEPRPIGTRYLTRNL

SEQ ID NO: 4858 - DNA, 2211 bp, Adeno-associated virus
atggctgccgatggttatcttccagattggctcgaggacactctctctgaaggaataagacagtggtggaagctcaaacctggcccaccaccaccaaagcccgcagagcggcataaggacgacagcaggggtcttgtgcttcctgggtacaagtacctcggacccggcaacggactcgacaagggggagccggtcaacgcagcagacgcggcggccctcgagcacgacaaggcctacgaccagcagctcaaggccggagacaacccgtacctcaagtacaaccacgccgacgccgagttccaggagcggctcaaagaagatacgtcttttgggggcaacctcgggcgagcagtcttccaggccaaaaagaggcttcttgaacctcttggtctggttgaggaagcggctaagacggctcctggaaagaagaggcctgtagagcagtctcctcaggaaccggactcctccgcgggtattggcaaatcgggttcacagcccgctaaaaagaaactcaatttcggtcagactggcgacacagagtcagtccccgaccctcaaccaatcggagaacctcccgcagccccctcaggtgtgggatctcttacaatggcttcaggtggtggcgcaccagtggcagacaataacgaaggtgccgatggagtgggtagttcctcgggaaattggcattgcgattcccaatggctgggggacagagtcatcaccaccagcacccgaacctgggccctgcccacctacaacaatcacctctacaagcaaatctccaacagcacatctggaggatcttcaaatgacaacgcctacttcggctacagcaccccctgggggtattttgacttcaacagattccactgccacttctcaccacgtgactggcagcgactcatcaacaacaactggggattccggcctaagcgactcaacttcaagctcttcaacattcaggtcaaagaggttacggacaacaatggagtcaagaccatcgccaataaccttaccagcacggtccaggtcttcacggactcagactatcagctcccgtacgtgctcgggtcggctcacgagggctgcctcccgccgttcccagcggacgttttcatgattcctcagtacgggtatctgacgcttaatgatgggagccaggccgtgggtcgttcgtccttttactgcctggaatatttcccgtcgcaaatgctaagaacgggtaacaacttccagttcagctacgagtttgagaacgtacctttccatagcagctacgctcacagccaaagcctggaccgactaatgaatccactcatcgaccaatacttgtactatctctcaaagactattaacggttctggacagaatcaacaaacgctaaaattcagcgtggccggacccagcaacatggctgtccagggaagaaactacatacctggacccagctaccgacaacaacgtgtctcaaccactgtgactcaaaacaacaacagcgaatttgcttggcctggagcttcttcttgggctctcaatggacgtaatagcttgatgaatcctggacctgctatggccagccacaaagaaggagaggaccgtttctttcctttgtctggatctttaatttttggcaaacaaggaactggaagagacaacgtggatgcggacaaagtcatgataaccaacgaagaagaaattaaaactactaacccggtagcaacggagtcctatggacaagtggccacaaaccaccagagtgcccaagcacaggcgcagaccggctgggttcaaaaccaaggaatacttccgggtatggtttggcaggacagagatgtgtacctgcaaggacccatttgggccaaaattcctcacacggacggcaactttcacccttctccgctaatgggagggtttggaatgaagcacccgcctcctcagatcctcatcaaaaacacacctgtacctgcggatcctccaacggctttcaataaggacaagctgaactctttcatcacccagtattctactggccaagtcagcgtggagattgagtgggagctgcagaaggaaaacagcaagcgctggaacccggagatccagtacacttccaactattacaagtctaataatgttgaatttgctgttaatactgaaggtgtatatagtgaaccccgccccattggcaccagatacctgactcgtaatctgtaa

SEQ ID NO: 4859 - protein, 736 aa, Adeno-associated virus
MAADGYLPDWLEDTLSEGIRQWWKLKPGPPPPKPAERHKDDSRGLVLPGYKYLGPGNGLDKGEPVNAADAAALEHDKAYDQQLKAGDNPYLKYNHADAEFQERLKEDTSFGGNLGRAVFQAKKRLLEPLGLVEEAAKTAPGKKRPVEQSPQEPDSSAGIGKSGSQPAKKKLNFGQTGDTESVPDPQPIGEPPAAPSGVGSLTMASGGGAPVADNNEGADGVGSSSGNWHCDSQWLGDRVITTSTRTWALPTYNNHLYKQISNSTSGGSSNDNAYFGYSTPWGYFDFNRFHCHFSPRDWQRLINNNWGFRPKRLNFKLFNIQVKEVTDNNGVKTIANNLTSTVQVFTDSDYQLPYVLGSAHEGCLPPFPADVFMIPQYGYLTLNDGSQAVGRSSFYCLEYFPSQMLRTGNNFQFSYEFENVPFHSSYAHSQSLDRLMNPLIDQYLYYLSKTINGSGQNQQTLKFSVAGPSNMAVQGRNYIPGPSYRQQRVSTTVTQNNNSEFAWPGASSWALNGRNSLMNPGPAMASHKEGEDRFFPLSGSLIFGKQGTGRDNVDADKVMITNEEEIKTTNPVATESYGQVATNHQSAQAQAQTGWVQNQGILPGMVWQDRDVYLQGPIWAKIPHTDGNFHPSPLMGGFGMKHPPPQILIKNTPVPADPPTAFNKDKLNSFITQYSTGQVSVEIEWELQKENSKRWNPEIQYTSNYYKSNNVEFAVNTEGVYSEPRPIGTRYLTRNL

SEQ ID NO: 4860 - DNA, 2208 bp, Adeno-associated virus
atggctgccgatggttatcttccagattggctcgaggacactctctctgaaggaataagacagcggtggaagctcaaacctggcccaccaccaccagagcccgcagagcggcataaggacgacagcaggggtcttgtgcttcctgggtacaagtacctcggacccttcaacggactcgacaagggagagccggtcaacgaggcagacgccgcggccctcgagcacgacaaagcctacgaccggcagctcgacagcggagacaacccgtacctcaagtacaaccacgccgacgcggagtttcaggagcgccttaaagaagatacgtcttttgggggcaacctcggacgagcagtcttccaggcgaaaaagagggtacttgaacctctgggcctggttgaggaacctgttaagacggctccgggaaaaaagaggccggtagagcactctcctgtggagccagactcctcctcgggaaccggaaaggcgggccagcagcctgcaagaaaaagattgaattttggtcagactggagacgcagactcagtacctgacccccagcctctcggacagccaccagcagccccctctggtctgggaactaatacgatggctacaggcagtggcgcaccaatggcagacaataacgagggcgccgacggagtgggtaattcctcgggaaattggcattgcgattccacatggatgggcgacagagtcatcaccaccagcacccgaacctgggccctgcccacctacaacaaccacctctacaaacaaatttccagccaatcaggagcctcgaacgacaatcactactttggctacagcaccccttgggggtattttgacttcaacagattccactgccacttttcaccacgtgactggcaaagactcatcaacaacaactggggattccgacccaagagactcaacttcaagctctttaacattcaagtcaaagaggtcacgcagaatgacggtacgacgacgattgccaataaccttaccggcacggttcaggtgtttactgactcggagtaccagctcccgtacgtcctcggctcggcgcatcaaggatgcctcccgccgttcccagcagacgtcttcatggtgccacagtatggatacctcaccctgaacaacgggagtcaggcagtaggacgctcttcattttactgcctggagtactttccttctcagatgctgcgtaccggaaacaactttaccttcagctacacttttgaggacgttcctttccacagcagctacgctcacagccagagtctgggccgtctcatgaatcctctcatcgaccagtacctgtattacttgagcagaacaaacactccaagtggaaccaccacgcagtcaaggcttcagttttctcaggccggagcgagtgacattcgggaccagtctaggaactggcttcctggaccctgttaccgccagcagcgagtatcaaagacatctgcggataacaacaacagtgaatactcgtggactggagctaccaagtaccacctcaatggcagagactctctggtgaatccgggcccggccatggcaagccacaaggacgatgaagaaaagttttttcctcagagcggggttctcatctttgggaagcaaggctcagagaaaacaaatgtggacattgaaaaggtcatgattacagacgaagaggaaatcaggacaaccaatcccgtggctacggagcagtatggttctgtatctaccaacctccagagaggcaacagacaagcagctaccgcagatgtcaacacacaaggcgttcttccaggcatggtctggcaggacagagatgtgtaccttcaggggcccatctgggcaaagattccacacacggacggacattttcacccctctcccctcatgggtggattcggacttaaacaccctcctccacagattctcatcaagaacaccccggtacctgcgaatccttcgaccaccttcagtgcggcaaagtttgcttccttcatcacacagtactccacgggacaggtcagcgtggagatcgagtgggagctgcagaaggaaaacagcaaacgctggaatcccgaaattcagtacacttccaactacaacaagtctgttaatgtggactttactgtggacactaatggcgtgtattcagagcctcgccccattggcaccagatacctgactcgtaatctgtaa

SEQ ID NO: 4861 - protein, 735 aa, Adeno-associated virus
MAADGYLPDWLEDTLSEGIRQRWKLKPGPPPPEPAERHKDDSRGLVLPGYKYLGPFNGLDKGEPVNEADAAALEHDKAYDRQLDSGDNPYLKYNHADAEFQERLKEDTSFGGNLGRAVFQAKKRVLEPLGLVEEPVKTAPGKKRPVEHSPVEPDSSSGTGKAGQQPARKRLNFGQTGDADSVPDPQPLGQPPAAPSGLGTNTMATGSGAPMADNNEGADGVGNSSGNWHCDSTWMGDRVITTSTRTWALPTYNNHLYKQISSQSGASNDNHYFGYSTPWGYFDFNRFHCHFSPRDWQRLINNNWGFRPKRLNFKLFNIQVKEVTQNDGTTTIANNLTGTVQVFTDSEYQLPYVLGSAHQGCLPPFPADVFMVPQYGYLTLNNGSQAVGRSSFYCLEYFPSQMLRTGNNFTFSYTFEDVPFHSSYAHSQSLGRLMNPLIDQYLYYLSRTNTPSGTTTQSRLQFSQAGASDIRDQSRNWLPGPCYRQQRVSKTSADNNNSEYSWTGATKYHLNGRDSLVNPGPAMASHKDDEEKFFPQSGVLIFGKQGSEKTNVDIEKVMITDEEEIRTTNPVATEQYGSVSTNLQRGNRQAATADVNTQGVLPGMVWQDRDVYLQGPIWAKIPHTDGHFHPSPLMGGFGLKHPPPQILIKNTPVPANPSTTFSAAKFASFITQYSTGQVSVEIEWELQKENSKRWNPEIQYTSNYNKSVNVDFTVDTNGVYSEPRPIGTRYLTRNL

SEQ ID NO: 4862 - DNA, 2208 bp, Adeno-associated virus
atggctgccgatggttatcttccagattggctcgaggacactctctctgaaggaataagacagcggtggaagctcaaacctggcccaccaccaccagagcccgcagagcggcataaggacgacagcaggggtcttgtgcttcctgggtacaagtacctcggacccttcaacggactcgacaagggagagccggtcaacgaggcagacgccgcggccctcgagcacgacaaagcctacgaccggcagctcgacagcggagacaacccgtacctcaagtacaaccacgccgacgcggagtttcaggagcgccttaaagaagatacgtcctttgggggcaacctcggacgagcagtcttccaggcgaaaaagagggtacttgaacctctgggcctggttgaggaacctgttaagacggctccgggaaaaaagaggccggtagagcactctcctgtggagccagactcctcctcgggaaccggaaaggcgggccagcagcctgcaagaaaaagattgaattttggtcagactggagacgcagactcagtacctgacccccagcctctcggacagccaccagcagccccctctggtctgggaactaatacgatggctacaggcagtggcgcaccaatggcagacaataacgagggcgccgacggagtgggtaattcctcgggaaattggcattgcgattccacatggatgggcgacagagtcatcaccaccagcacccgaacctgggccctgcccacctacaacaaccacctctacaaacaaatttccagccaatcaggagcctcgaacgacaatcactactttggctacagcaccccttgggggtattttgacttcaacagattccactgccacttttcaccacgtgactggcaaagactcatcaacaacaactggggattccgacccaagagactcaacttcaagctctttaacattcaagtcaaagaggtcacgcagaatgacggtacgacgacgattgccaataaccttaccagcacggttcaggtgtttactgactcggagtaccagctcccgtacgtcctcggctcggcgcatcaaggatgcctcccgccgttcccagcagacgtcttcatggtgccacagtatggatacctcaccctgaacaacgagagtcaggcagtaggacgctcttcattttactgcctggagtactttccttctcagatgctgcgtaccggaaacaactttaccttcagctacacttttgaggacgttcctttccacagcagctacgctcacagccagagtctgggccgtctcatgaatcctctcatcgaccagtacctgtattacttgagcagaacaaacactccaagtggaaccaccacgcagtcaaggcttcagttttctcaggccggagcgagtgacattcgggaccagtctaggaactggcttcctggaccctgttaccgccagcagcgagtatcaaagacatctgcggataacaacaacagtgaatactcgtggactggagctaccaagtaccacctcaatggcagagactctctggtgaatccgggcccggccatggcaagccacaaggacgatgaagaaaagttttttcctcagagcggggttctcatctttgggaagcaaggctcagagaaaacaaatgtggacattgaaaaggtcatgattacagacgaagaggaaatcaggacaaccaatcccgtggctacggagcagtatggttctgtatctaccaacctccagagaggcaacagacaagcagctaccgcagatgtcaacacacaaggcgttcttccaggcatggtctggcaggacagagatgtgtaccttcaggggcccatctgggcaaagattccacacacggacggacattttcacccctctcccctcatgggtggattcggacttaaacaccctcctccacagattctcatcaagaacaccccggtacctgcgaatccttcgaccaccttcagtgcggcaaagtttgcttccttcatcacacagtactccacgggacaggtcagcgtggagatcgagtgggagctgcagaaggaaaacagcaaacgctggaatcccgaaattcagtacacttccaactacaacaagtctgttaatgtggactttactgtggacactaatggcgtgtattcagagcctcgccccattggcaccagatacctgactcgtaatctgtaa

SEQ ID NO: 4863 - protein, 735 aa, Adeno-associated virus
MAADGYLPDWLEDTLSEGIRQRWKLKPGPPPPEPAERHKDDSRGLVLPGYKYLGPFNGLDKGEPVNEADAAALEHDKAYDRQLDSGDNPYLKYNHADAEFQERLKEDTSFGGNLGRAVFQAKKRVLEPLGLVEEPVKTAPGKKRPVEHSPVEPDSSSGTGKAGQQPARKRLNFGQTGDADSVPDPQPLGQPPAAPSGLGTNTMATGSGAPMADNNEGADGVGNSSGNWHCDSTWMGDRVITTSTRTWALPTYNNHLYKQISSQSGASNDNHYFGYSTPWGYFDFNRFHCHFSPRDWQRLINNNWGFRPKRLNFKLFNIQVKEVTQNDGTTTIANNLTSTVQVFTDSEYQLPYVLGSAHQGCLPPFPADVFMVPQYGYLTLNNESQAVGRSSFYCLEYFPSQMLRTGNNFTFSYTFEDVPFHSSYAHSQSLGRLMNPLIDQYLYYLSRTNTPSGTTTQSRLQFSQAGASDIRDQSRNWLPGPCYRQQRVSKTSADNNNSEYSWTGATKYHLNGRDSLVNPGPAMASHKDDEEKFFPQSGVLIFGKQGSEKTNVDIEKVMITDEEEIRTTNPVATEQYGSVSTNLQRGNRQAATADVNTQGVLPGMVWQDRDVYLQGPIWAKIPHTDGHFHPSPLMGGFGLKHPPPQILIKNTPVPANPSTTFSAAKFASFITQYSTGQVSVEIEWELQKENSKRWNPEIQYTSNYNKSVNVDFTVDTNGVYSEPRPIGTRYLTRNL

SEQ ID NO: 4864 - DNA, 2208 bp, Adeno-associated virus
atggctgccgatggttatcttccagattggctcgaggacactctctctgaaggaataagacagcggtggaagctcaaacctggcccaccaccaccagagcccgcagagcggcataaggacgacagcaggggtcttgtgcttcctgggtacaagtacctcggacccttcaacggactcgacaagggagagccggtcaacgaggcagacgccgcggccctcgagcacgacaaagcctacgaccggcagctcgacagcggagacaacccgtacctcaagtacaaccacgccgacgcggagtttcaggagcgccttaaagaagatacgtcttttgggggcaacctcggacgagcagtcttccaggcgaaaaagagggtacttgaacctctgggcctggttgaggaacctgttaagacggctccgggaaaaaagaggccggtagagcactctcctgtggagccagactcctcctcgggaaccggaaaggcgggccagcagcctgcaagaaaaagattgaattttggtcagactggagacgcagactcagtacctgacccccagcctctcggacagccaccagcagccccctctggtctgggaactaatacgatggctacaggcagtggcgcaccaatggcagacaataacgagggcgccgacggagtgggtaattcctcgggaaattggcattgcgattccacatggatgggcgacagagtcatcaccaccagcacccgaacctgggccctgcccacctacaacaaccacctctacaaacaaatttccagccaatcaggagcctcgaacgacaatcactactttggctacagcaccccttgggggtattttgacttcaacagattccactgccacttttcaccacgtgactggcaaagactcatcaacaacaactggggattccgacccaagagactcaacttcaagctctttaacattcaagtcaaagaggtcacgcagaatgacggtacgacgacgattgccaataaccttaccagcacggttcaggtgtttactgactcggagtaccagctcccgtacgtcctcggctcggcgcatcaaggatgcctcccgccgttcccagcagacgtcttcatggtaccacagtatggatacctcaccctgaacaacgggagtcaggcagtaggacgctcttcattttactgcctggagtactttccttctcagatgctgcgtaccggaaacaactttaccttcagctacacttttgaggacgttcctttccacagcagctacgctcacagccagagtctgggccgtctcatgaatcctctcatcgaccagtacctgtattacttgagcagaacaaacactccaagtggaaccaccacgcagtcaaggcttcagttttctcaggccggagcgagtgacattcgggaccagtctaggaactggcttcctggaccctgttaccgccagcagcgagtatcaaagacatctgcggataacaacaacagtgaatactcgtggactggagctaccaagtaccacctcaatggcagagactctctggtgaatccgggcccggccatggcaagccacaaggacgatgaagaaaagttttttcctcagagcggggttctcatctttgggaagcaaggctcagagaaaacaaatgtggacattgaaaaggtcatgattacagacgaagaggaaatcaggacaaccaatcccgtggctacggagcagtatggttctgtatctaccaacctccagagaggcaacagacaagcagctaccgcagatgtcaacacacaaggcgttcttccaggcatggtctggcaggacagagatgtgtaccttcaggggcccatctgggcaaagattccacacacggacggacattttcacccctctcccctcatgggtggattcggacttaaacaccctcctccacagattctcatcaagaacaccccggtacctgcgaatccttcgaccaccttcagtgcggcaaagtttgcttccttcatcacacagtactccacgggacaggtcagcgtggagatcgagtgggagctgcagaaggaaaacagcaaacgctggaatcccgaaattcagtacacttccaactacaacaagtctgttaatgtggactttactgtggacactaatggcgtgtattcagagcctcgccccattggcaccagatacctgactcgtaatctgtaa

SEQ ID NO: 4865 - protein, 735 aa, Adeno-associated virus
MAADGYLPDWLEDTLSEGIRQRWKLKPGPPPPEPAERHKDDSRGLVLPGYKYLGPFNGLDKGEPVNEADAAALEHDKAYDRQLDSGDNPYLKYNHADAEFQERLKEDTSFGGNLGRAVFQAKKRVLEPLGLVEEPVKTAPGKKRPVEHSPVEPDSSSGTGKAGQQPARKRLNFGQTGDADSVPDPQPLGQPPAAPSGLGTNTMATGSGAPMADNNEGADGVGNSSGNWHCDSTWMGDRVITTSTRTWALPTYNNHLYKQISSQSGASNDNHYFGYSTPWGYFDFNRFHCHFSPRDWQRLINNNWGFRPKRLNFKLFNIQVKEVTQNDGTTTIANNLTSTVQVFTDSEYQLPYVLGSAHQGCLPPFPADVFMVPQYGYLTLNNGSQAVGRSSFYCLEYFPSQMLRTGNNFTFSYTFEDVPFHSSYAHSQSLGRLMNPLIDQYLYYLSRTNTPSGTTTQSRLQFSQAGASDIRDQSRNWLPGPCYRQQRVSKTSADNNNSEYSWTGATKYHLNGRDSLVNPGPAMASHKDDEEKFFPQSGVLIFGKQGSEKTNVDIEKVMITDEEEIRTTNPVATEQYGSVSTNLQRGNRQAATADVNTQGVLPGMVWQDRDVYLQGPIWAKIPHTDGHFHPSPLMGGFGLKHPPPQILIKNTPVPANPSTTFSAAKFASFITQYSTGQVSVEIEWELQKENSKRWNPEIQYTSNYNKSVNVDFTVDTNGVYSEPRPIGTRYLTRNL

SEQ ID NO: 4866 - DNA, 2208 bp, Adeno-associated virus
atggctgccgatggttatcttccagattggctcgaggacactctctctgaaggaataagacagcggtggaagctcaaacctggcccaccaccaccagagcccgcagagcggcataaggacgacagcaggggtcttgtgcttcctgggtacaagtacctcggacccttcaacggactcgacaagggagagccggtcaacgaggcagacgccgcggccctcgagcacgacaaagcctacgaccggcagctcgacagcggagacaacccgtacctcaagtacaaccacgccgacgcggagtttcaggagcgccttaaagaagatacgtcttttgggggcaacctcggacgagcagtcttccaggcgaaaaagagggtactcgaacctctgggcctggttgaggaacctgttaagacggctccgggaaaaaagaggccggtagagcactctcctgtggagccagactcctcctcgggaaccggaaaggcgggccagcagcctgcaagaaaaagattgaattttggtcagactggagacgcagactcagtacctgacccccagcctctcggacagccaccagcagccccctctggtctgggaactaatacgatggctacaggcagtggcgcaccaatggcagacaataacgagggcgccgacggagtgggtaattcctcgggaaattggcattgcgattccacatggatgggcgacagagtcatcaccaccagcacccgaacctgggccctgcccacctacaacaaccacctctacaaacaaatttccagccaatcaggagcctcgaacgacaatcactactttggctacagcaccccttgggggtattttgacttcaacagattccactgccacttttcaccacgtgactggcaaagactcatcaacaacaactggggattccgacccaagagactcaacttcaagctctttaacattcaagtcaaagaggtcacgcagaatgacggtacgacgacgattgccaataaccttaccagcacggttcaggtgtttactgactcggagtaccagctcccgtacgtcctcggctcggcgcatcaaggatgcctcccgccgttcccagcagacgtcttcatggtgccacagtatggatacctcaccctgaacaacgggagtcaggcagcaggacgctcttcattttactgcctggagtactttccttctcagatgctgcgtaccggaaacaactttaccttcagctacacttttgaggacgttcctttccacagcagctacgctcacagccagagtctgggccgtctcatgaatcctctcatcgaccagtacctgtattacttgagcagaacaaacactccaagtggaaccaccacgcagtcaaggcttcagttttctcaggccggagcgagtgacattcgggaccagtctaggaactggcttcctggaccctgttaccgccagcagcgagtatcaaagacatctgcggataacaacaacagtgaatactcgtggactggagctaccaagtaccacctcaatggcagagactctctggtgaatccgggcccggccatggcaagccacaaggacgatgaagaaaagttttttcctcagagcggggttctcatctttgggaagcaaggctcagagaaaacaaatgtggacattgaaaaggtcatgattacagacgaagaggaaatcaggacaaccaatcccgtggctacggagcagtatggttctgtatctaccaacctccagagaggcaacagacaagcagctaccgcagatgtcaacacacaaggcgttcttccaggcatggtctggcaggacagagatgtgtaccttcaggggcccatctgggcaaagattccacacacggacggacattttcacccctctcccctcatgggtggattcggacttaaacaccctcctccacagattctcatcaagaacaccccggtacctgcgaatccttcgaccaccttcagtgcggcaaagtttgcttccttcatcacacagtactccacgggacaggtcagcgtggagatcgagtgggagctgcagaaggaaaacagcaaacgctggaatcccgaaattcagtacacttccaactacaacaagtccgttaatgtggactttactgtggacactaatggcgtgtattcagagcctcgccccattggcaccagatacctgactcgtaatctgtaa

SEQ ID NO: 4867 - protein, 735 aa, Adeno-associated virus
MAADGYLPDWLEDTLSEGIRQRWKLKPGPPPPEPAERHKDDSRGLVLPGYKYLGPFNGLDKGEPVNEADAAALEHDKAYDRQLDSGDNPYLKYNHADAEFQERLKEDTSFGGNLGRAVFQAKKRVLEPLGLVEEPVKTAPGKKRPVEHSPVEPDSSSGTGKAGQQPARKRLNFGQTGDADSVPDPQPLGQPPAAPSGLGTNTMATGSGAPMADNNEGADGVGNSSGNWHCDSTWMGDRVITTSTRTWALPTYNNHLYKQISSQSGASNDNHYFGYSTPWGYFDFNRFHCHFSPRDWQRLINNNWGFRPKRLNFKLFNIQVKEVTQNDGTTTIANNLTSTVQVFTDSEYQLPYVLGSAHQGCLPPFPADVFMVPQYGYLTLNNGSQAAGRSSFYCLEYFPSQMLRTGNNFTFSYTFEDVPFHSSYAHSQSLGRLMNPLIDQYLYYLSRTNTPSGTTTQSRLQFSQAGASDIRDQSRNWLPGPCYRQQRVSKTSADNNNSEYSWTGATKYHLNGRDSLVNPGPAMASHKDDEEKFFPQSGVLIFGKQGSEKTNVDIEKVMITDEEEIRTTNPVATEQYGSVSTNLQRGNRQAATADVNTQGVLPGMVWQDRDVYLQGPIWAKIPHTDGHFHPSPLMGGFGLKHPPPQILIKNTPVPANPSTTFSAAKFASFITQYSTGQVSVEIEWELQKENSKRWNPEIQYTSNYNKSVNVDFTVDTNGVYSEPRPIGTRYLTRNL

SEQ ID NO: 4868 - protein, 738 aa, Adeno-associated virus; identical to SEQ ID NO: 4760

SEQ ID NO: 4869 - DNA, 2217 bp, Adeno-associated virus
atggctgctgacggttatcttccagattggctcgaggacaacctctctgagggcattcgcgagtggtgggacctgaaacctggagcccccaagcccaaggccaaccagcagaagcaggacgacggccggggtctggtgcttcctggctacaagtacctcggacccttcaacggactcgacaagggggagcccgtcaacgcggcggacgcagcggccctcgagcacgacaaggcctacgaccagcagctcaaagcgggtgacaatccgtacctgcggtataaccacgccgacgccgagtttcaggagcgtctgcaagaagatacgtcttttgggggcaacctcgggcgagcagtcttccaggccaagaagcgggttctcgaacctctcggtctggttgaggaagctgctaagacggctcctggaaagaagagaccggtagaaccgtcacctcagcgttcccccgactcctccacgggcatcggcaagaaaggccagcagcccgctaaaaagagactgaactttggtcagactggcgactcagagtcagtccccgaccctcaaccaatcggagaaccaccagcaggcccctctggtctgggatctggtacaatggctgcaggcggtggcgctccaatggcagacaataacgaaggcgccgacggagtgggtagttcctcaggaaattggcattgcgattccacatggctgggcgacagagtcatcaccaccagcacccgaacctgggccctgcccacctacaacaaccacctctacaagcaaatatccaatgggacatcgggaggaagcaccaacgacaacacctacttcggctacagcaccccctgggggtattttgacttcaacagattccactgccacttctcaccacgtgactggcagcgactcatcaacaacaactggggattccggccaaaaagactcagcttcaagctcttcaacatccaggtcaaggaggtcacgcagaatgaaggcaccaagaccatcgccaataaccttaccagcacgattcaggtatttacggactcggaataccagctgccgtacgtcctcggctccgcgcaccagggctgcctgcctccgttcccggcggacgtcttcatgattccccagtacggctaccttacactgaacaatggaagtcaagccgtaggccgttcctccttctactgcctggaatattttccatctcaaatgctgcgaactggaaacaattttgaattcagctacaccttcgaggacgtgcctttccacagcagctacgcacacagccagagcttggaccgactgatgaatcctctcatcgaccagtacctgtactacttatccagaactcagtccacaggaggaactcaaggtacccagcaattgttattttctcaagctgggcctgcaaacatgtcggctcaggctaagaactggctacctggaccttgctaccggcagcagcgagtctctacgacactgtcgcaaaacaacaacagcaactttgcttggactggtgccaccaaatatcacctgaacggaagagactctttggtaaatcccggtgtcgccatggcaacccacaaggacgacgaggaacgcttcttcccgtcgagtggagtcctgatgttcggaaaacagggtgctggaagagacaatgtggactacagcagcgttatgctaaccagcgaagaagaaattaaaaccactaaccccgtagccacagaacaatacggtgtggtggctgacaacttgcagcaaaccaatacagggcctattgtgggaaatgtcaacagccaaggagccttacctggcatggtctggcagaaccgagacgtgtacctgcagggtcccatctgggccaagattcctcacacggacggcaacttccacccttcaccgctaatgggaggatttggactgaagcacccacctcctcagatcctgatcaagaacacgccggtacctgcggatcctccaacaacgttcagccaggcgaaattggcttccttcattacgcagtacagcaccggacaggtcagcgtggaaatcgagtgggagctgcagaaggagaacagcaaacgctggaacccagagattcagtacacttcaaactactacaaatctacaaatgtggactttgctgtcaatacagagggaacttattctgagcctcgccccattggtactcgttacctcacccgtaatctgtaa

SEQ ID NO: 4870 - protein, 738 aa, Adeno-associated virus
MAADGYLPDWLEDNLSEGIREWWDLKPGAPKPKANQQKQDDGRGLVLPGYKYLGPFNGLDKGEPVNAADAAALEHDKAYDQQLKAGDNPYLRYNHADAEFQERLQEDTSFGGNLGRAVFQAKKRVLEPLGLVEEAAKTAPGKKRPVEPSPQRSPDSSTGIGKKGQQPAKKRLNFGQTGDSESVPDPQPIGEPPAGPSGLGSGTMAAGGGAPMADNNEGADGVGSSSGNWHCDSTWLGDRVITTSTRTWALPTYNNHLYKQISNGTSGGSTNDNTYFGYSTPWGYFDFNRFHCHFSPRDWQRLINNNWGFRPKRLSFKLFNIQVKEVTQNEGTKTIANNLTSTIQVFTDSEYQLPYVLGSAHQGCLPPFPADVFMIPQYGYLTLNNGSQAVGRSSFYCLEYFPSQMLRTGNNFEFSYTFEDVPFHSSYAHSQSLDRLMNPLIDQYLYYLSRTQSTGGTQGTQQLLFSQAGPANMSAQAKNWLPGPCYRQQRVSTTLSQNNNSNFAWTGATKYHLNGRDSLVNPGVAMATHKDDEERFFPSSGVLMFGKQGAGRDNVDYSSVMLTSEEEIKTTNPVATEQYGVVADNLQQTNTGPIVGNVNSQGALPGMVWQNRDVYLQGPIWAKIPHTDGNCHPSPLMGGFGLKHPPPQILIKNTPVPADPPTTFSQAKLASFITQYSTGQVSVEIEWELQKENSKRWNPEIQYTSNYYKSTNVDFAVNTEGTYSEPRPIGTRYLTRNL

SEQ ID NO: 4871 - protein, 738 aa, Adeno-associated virus
MAADGYLPDWLEDNLSEGIREWWDLKPGAPKPKANQQKQDDGRGLVLPGYKYLGPFNGLDKGEPVNAADAAALEHDKAYDQQLKAGDNPYLRYNHADAEFQERLQEDTSFGGNLGRAVFQAKKRVLEPLGLVEEGAKTAPGKKRPVEPSPQRSPDSSTGIGKKGQQPARKRLNFGRTGDSESVPDPQPIGEPPAAPSSVGSGTMAAGGGAPMADNNEGADGVGSSSGNWHCDSTWLGDRVITTSTRTWALPTYNNHLYKQISNGTSGGSTNDNTYFGYSTPWGYLDFNRFHCHFSPRDWQRLINNNWGFRPKRLSFKLFNIQVKEVTQNEGTKTIANNLASTIQVFTDSEYQPPYVLGSAHQGCLPPFPADVFMIPQYGYLTLNNGSQAVGRSSFYCLEYFPSQMLRTGNNFSFSYTFEDVPFHSSYAHSQSLDRLMNPLIDQYLYYLSRTQSTGGTAGTQQLLFSRAGPSNMSAQARNWLPGPCYRQQRVSTTLSQNNNSNFAWTGATKYHLNGRDSLVNPGVAMATNKDDEDRFFPSSGILMFGKQGAGKDNVDYSNVMLTSEEEIKTTNPVATEQYGVVADNLQQQNTAPTVGAVNSQGALPGMVWQNRDVYLQGPIWAKIPHTDGNFHPSPLMGGFGLKHPPPQILIKNTPVPADPPTAFNQAKLNSFIAQYSTGQVSVEIEWELQKENSKRWNPEIQYTSNYYKSTNADFAVNTEGVYSEPRPIGTRYLTRNL

SEQ ID NO: 4872 - DNA, 2217 bp, Adeno-associated virus
atggctgccgatggttatcttccagattggctcgaggacaacctctctgagggcattcgcgagtggtgggacctgaaacctggagccccgaaacccaaagccaaccagcaaaagcaggacgacggccggggtctggtgcttcctggctacaagtacctcggacccttcaacggactcgacaagggggagcccgtcaacgcggcggacgcagcggccctcgagcacgacaaggcctacgaccagcagctcaaagcgggtgacaatccgtacctgcggtataatcacgccgacgccgagtttcaggagcgtctgcaagaagatacgtcttttgggggcaacctcgggcgagcagtcttccaggccaagaagcgggttctcgaacctctcggtctggttgaggaaggcgctaagacggctcctggaaagaagagaccggtagagccgtcaccacagcgttcccccgactcctccacgggcatcggcaagaaaggccagcagcccgccagaaagagactcaatttcggtcggactggcgactcagagtcagtccccgaccctcaacctatcggagaacctccagcagcgccctctagtgtgggatctggtacaatggctgcaggcggtggcgcaccaatggcagacaataacgaaggtgccgacggagtgggtagttcctcgggaaattggcattgcgattccacatggctgggcgacagagttatcaccaccagcacccgaacctgggccctgcccacctacaacaaccacctctacaagcaaatctccaacgggacctcgggaggcagcaccaacgacaacacctactttggctacagcaccccctgggggtatcttgactttaacagattccactgccacttctcaccacgtgactggcagcgactcatcaacaacaactggggattccggcccaagagactcagcttcaagctcttcaacatccaggtcaaagaggtcacgcagaatgaaggcaccaagaccatcgccaataacctcgccagcaccatccaggtgtttacggactcggaataccagccgccgtacgtcctcggctctgcccaccagggctgcctgcctccgttcccggcggacgtcttcatgattcctcagtacggctacctgactctcaacaacggtagtcaggccgtgggacgttcctccttctactgcctggagtacttcccctctcagatgctgagaacgggcaacaacttttccttcagctacactttcgaggacgtgcctttccacagcagctacgcgcacagccagagtttggacaggctgatgaatcctctcatcgaccagtacctgtactacctgtcaagaacccagtctacgggaggcacagcgggaacccagcagttgctgttttctcgggccgggcctagcaacatgtcggctcaggccagaaactggctgcctggaccctgctacagacagcagcgcgtctccacgacactgtcgcaaaacaacaacagcaactttgcctggactggtgccaccaagtatcatctgaacggcagagactctctggtgaatccgggcgtcgccatggcaaccaacaaggacgacgaggaccgcttcttcccatccagcggcatcctcatgtttggcaagcagggagctggaaaagacaacgtggactatagcaacgtgatgctaaccagcgaggaagaaatcaagaccaccaaccccgtggccacagaacagtatggcgtggtggctgataacctacagcagcaaaacaccgctcctactgtgggggccgtcaacagccagggagccttacctggcatggtctggcagaaccgggacgtgtacctgcagggtcctatttgggccaagattcctcacacagatggcaactttcacccgtctcctttaatgggcggctttggacttaaacatccgcctcctcagatcctcatcaaaaacactcctgttcctgcggatcctccaacagcgttcaaccaggccaagctgaattctttcatcgcgcagtacagcaccggacaagtcagcgtggagatcgagtgggagctgcagaaggagaacagcaagcgctggaacccagagattcagtatacttccaactactacaaatctacaaatgcggactttgctgttaatactgagggtgtttactctgagcctcgccccattggcactcgttacctcacccgtaatctgtaa

SEQ ID NO: 4873 - DNA, 2208 bp, Adeno-associated virus
atggctgccgatggttatcttccagattggctcgaggacactctctctgaaggaataagacagtggtggaagctcaaacctggcccaccaccaccaaagcccgcagagcggcataaggacgacagcaggggtcttgtgcttcctgggtacaagtacctcggacccttcaacggactcgacaagggggagccggtcaacgaggcagacgccgcggccctcgagcacgacaaggcctacgaccggcagctcgacagcggagacaacccgtacctcaagtacaaccacgccgacgcagagtttcaggagcgccttaaagaagatacgtcttttgggggcaacctcggacgagcagtcttccaggcgaaaaagagggttcttgaacctctgggcctggttgaggagcctgttaagacggctccgggaaaaaagaggccggtagagcactctcctgtggagccagactcctcctcgggaaccggaaaagcgggccagcagcctgcaagaaaaagattaaattttggtcagactggagacgcagactccgtacctgacccccagcctctcggacagccaccagcagccccctctggtctgggatctactacaatggctacaggcagtggcgcaccaatggcagacaataacgagggtgccgatggagtgggtaattcctcaggaaattggcattgcgattcccaatggctgggcgacagagtcatcaccaccagcacccgaacctgggccctgcccacatacaacaaccacctctacaagcaaatctccagccaatcaggagccagcaacgacaaccactactttggctacagcaccccctgggggtattttgacttcaacagattccactgccacttttcaccacgtgactggcaaagactcgtcaacaacaaccggggattccggcccaaaagactcaacttcaagctctttaatattcaagtcaaagaggtcacgcagaatgacggtacgacgacgattgccaataaccttaccagcacggttcaggtgtttactgactcggagtaccagctcccgtacgtcctgggctcggcgcatcaaggatgcctcccgccgtttccagcggacgtcttcatggtcccacagtatggatacctcaccctgaacaacgggagtcaggcggtaggacgctcttccttttactgcctggagtactttccttctcagatgctgcgtactggaaacaactttcagttcagctacacttttgaagacgtgcctttccacagcagctacgctcacagccagagtctggatcggctgatgaatcctctgatcgaccagtacctgtattatctgaacaagacacaaacaaatagtggaactcttcagcagtctcggctactgtttagccaagctggaccaaccaacatgtctcttcaagctaaaaactggctgcctggaccttgctacagacagcagcgtctgtcaaaacaggcaaacgacaacaacaacagcaactttccctggactgcagctacaaagtatcatctaaatggccgggactcgttggttaatccaggaccagctatggccagtcacaaggatgacgaagaaaagtttttccccatgcatggaaccctgatatttggtaaacaaggaacaaatgccaacgacgcggatttggaaaatgtcatgattacagatgaagaagaaatcagggccaccaatcccgtggctacggagcagtacgggactgtgtcaaataatttgcaaaactcaaacactggtccaactactggaactgtcaatcaccaaggagcgttacctggtatggtgtggcaggatcgagacgtgtacctgcagggacccatttgggccaagattcctcacaccgatggacactttcatccttctccactgatgggaggttttggactcaaacacccgcctcctcagatcatgatcaaaaacactcccgttccagccaatcctcccacaaacttcagttctgccaagtttgcttctttcatcacacagtattccacgggacaggtcagcgtggagatcgagtgggagctgcagaaggagaacagcaaacgctggaatcccgaaattcagtacacttccaactacaacaagtctgttaatgtggactttactgtggacactaatggtgtgtattcagagcctcgccccattggcaccagatacctgactcgtaatctgtaa

SEQ ID NO: 4874 - protein, 735 aa, Adeno-associated virus
MAADGYLPDWLEDTLSEGIRQWWKLKPGPPPPKPAERHKDDSRGLVLPGYKYLGPFNGLDKGEPVNEADAAALEHDKAYDRQLDSGDNPYLKYNHADAEFQERLKEDTSFGGNLGRAVFQAKKRVLEPLGLVEEPVKTAPGKKRPVEHSPVEPDSSSGTGKAGQQPARKRLNFGQTGDADSVPDPQPLGQPPAAPSGLGSTTMATGSGAPMADNNEGADGVGNSSGNWHCDSQWLGDRVITTSTRTWALPTYNNHLYKQISSQSGASNDNHYFGYSTPWGYFDFNRFHCHFSPRDWQRLVNNNRGFRPKRLNFKLFNIQVKEVTQNDGTTTIANNLTSTVQVFTDSEYQLPYVLGSAHQGCLPPFPADVFMVPQYGYLTLNNGSQAVGRSSFYCLEYFPSQMLRTGNNFQFSYTFEDVPFHSSYAHSQSLDRLMNPLIDQYLYYLNKTQTNSGTLQQSRLLFSQAGPTNMSLQAKNWLPGPCYRQQRLSKQANDNNNSNFPWTAATKYHLNGRDSLVNPGPAMASHKDDEEKFFPMHGTLIFGKQGTNANDADLENVMITDEEEIRATNPVATEQYGTVSNNLQNSNTGPTTGTVNHQGALPGMVWQDRDVYLQGPIWAKIPHTDGHFHPSPLMGGFGLKHPPPQIMIKNTPVPANPPTNFSSAKFASFITQYSTGQVSVEIEWELQKENSKRWNPEIQYTSNYNKSVNVDFTVDTNGVYSEPRPIGTRYLTRNL

SEQ ID NO: 4875 - protein, 738 aa, Adeno-associated virus
MAADGYLPDWLEDNLSEGIREWWDLKPGAPKPKANQQKQDDGRGLVLPGYKYLGPFNGLDKGEPVNAADAAALEHDKAYDQQLKAGDNPYLRYNHADAEFQERLQEDTSFGGNLGRAVFQAKKRVLEPLGLVEEAAKTAPGKKRPVEPSPQRSPDSSTGIGKKGQQPAKKRLSFGQTGDSESVPDPQPIGEPPAGPSGLGSGTMAAGGGAPMADNNEGADGVGSSSGNWHCDSTWLGDRVITTSTRTWALPTYNNHLYKQISNGTSGGSTNDNTYFGYSTPWGYFDFNRFHCHFSPRDWQRLINNNWGFRPKRLSFKLFNIQVKEVTQNEGTKTIANNLTSTIQVFTDSEYQLPYVLGSAHQGCLPPFPADVFMIPQYGYLTLNNGSQAVGRSSFYCLEYFPSQMLRTGNNSEFSYTFEDVPFHSSYAHSQSLDRLMNPLIDQYLYYLSRTQSTGGTQGTQQLLFSQAGPANMSAQAKNWLPGPCYRQQRVSTTLSQNNNSNFAWTGATKYHLNGRDSLVNPGVAMATHKDDEERFFPSSGVLMFGKQGAGRDNVDYSSVMLTSEEEIKTTNPVATEQYGVVADNLQQTNTGPIVGNVNSQGALPGMVWQNRDVYLQGPIWAKIPHTDGNFHPSPLMGGFGLKHPPPQILIKNTPVPADPPTTFSQAKLASFITQYSTGQVSVEIEWELQKENSKRWNPEIQYTSNYYKSTNVDFAVNTEGTYSEPRPIGTRYLTRNL

SEQ ID NO: 4876 - DNA, 2217 bp, Adeno-associated virus
atggctgctgacggttatcttccagattggctcgaggacaacctctctgagggcattcgcgagtggtgggacctgaaacctggagcccccaagcccaaggccaaccagcagaagcaggacgacggccggggtctggtgcttcctggctacaagtacctcggacccttcaacggactcgacaagggggagcccgtcaacgcggcggacgcagcggccctcgagcacgacaaggcctacgaccagcagctcaaagcgggtgacaatccgtacctgcggtataaccacgccgacgccgagtttcaggagcgtctgcaagaagatacgtcttttgggggcaacctcgggcgagcagtcttccaggccaagaagcgggttctcgaacctctcggtctggttgaggaagctgctaagacggctcctggaaagaagagaccggtagaaccgtcacctcagcgttcccccgactcctccacgggcatcggcaagaaaggccagcagcccgctaaaaagagactgagctttggtcagactggcgactcagagtcagtccccgaccctcaaccaatcggagaaccaccagcaggcccctctggtctgggatctggtacaatggctgcaggcggtggcgctccaatggcagacaataacgaaggcgccgacggagtgggtagttcctcaggaaattggcattgcgattccacatggctgggcgacagagtcatcaccaccagcacccgaacctgggccctgcccacctacaacaaccacctctacaagcaaatatccaatgggacatcgggaggaagcaccaacgacaacacctacttcggctacagcaccccctgggggtattttgacttcaacagattccactgccacttctcaccacgtgactggcagcgactcatcaacaacaactggggattccggccaaaaagactcagcttcaagctcttcaacatccaggtcaaggaggtcacgcagaatgaaggcaccaagaccatcgccaataaccttaccagcacgattcaggtatttacggactcggaataccagctgccgtacgtcctcggctccgcgcaccagggctgcctgcctccgttcccggcggacgtcttcatgattccccagtacggctaccttacactgaacaatggaagtcaagccgtaggccgttcctccttctactgcctggaatattttccatctcaaatgctgcgaactggaaacaattctgaattcagctacaccttcgaggacgtgcctttccacagcagctacgcacacagccagagcttggaccgactgatgaatcctctcatcgaccagtacctgtactacttatccagaactcagtccacaggaggaactcaaggtacccagcaattgttattttctcaagctgggcctgcaaacatgtcggctcaggctaagaactggctacctggaccttgctaccggcagcagcgagtctctacgacactgtcgcaaaacaacaacagcaactttgcttggactggtgccaccaaatatcacctgaacggaagagactctttggtaaatcccggtgtcgccatggcaacccacaaggacgacgaggaacgcttcttcccgtcgagtggagtcctgatgtttggaaaacagggtgctggaagagacaatgtggactacagcagcgttatgctaaccagcgaagaagaaattaaaaccactaaccctgtagccacagaacaatacggtgtggtggctgacaacttgcagcaaaccaatacagggcctattgtgggaaatgtcaacagccaaggagccttacctggcatggtctggcagaaccgagacgtgtacctgcagggtcccatctgggccaagattcctcacacggacggcaacttccacccttcaccgctaatgggaggatttggactgaagcacccacctcctcagatcctgatcaagaacacgccggtacctgcggatcctccaacaacgttcagccaggcgaaattggcttccttcattacgcagtacagcaccggacaggtcagcgtggaaatcgagtgggagctgcagaaggagaacagcaaacgctggaacccagagattcagtacacttcaaactactacaaatctacaaatgtggactttgctgtcaatacagagggaacttattctgagcctcgccccattggtactcgttacctcacccgtaatctgtaa

SEQ ID NO: 4877 - protein, 738 aa, Adeno-associated virus
MAADGYLPDWLEDNLSEGIREWWDLKPGAPKPKANQQKQDDGRGLVLPGYKYLGPFNGLDKGEPVNAADAAALEHDKAYDQQLKAGDNPYLRYNHADAEFQERLQEDTSFGGNLGRAVFQAKKRVLEPLGPVEEAAKTAPGKKRPVEPPPQRSPDSSTGIGKKGQQPAKKRLNFGQTGDSESVPDPQPIGEPPAGPSGLGSGTMAAGGGAPMADNNEGADGVGSSSGNWHCDSTWLGDRVITTSTRTWALPTYNNHLYKQISNGTSGGSTNDNTYFGYSTPWGYFDFNRFHCHFSPRDWQRLINNNWGFRPKRLSFKLFNIQVKEVTQNEGTKTVANNLTSTIQVFTDSEYQLPYVLGSAHQGCLPPFPADVFMIPQYGYLTLNNGSQAVGRSSFYCLEYFPSQMLRTGNNFEFSYTFEDVPFHSSYAHSQSLDRLMNPLIDQYLYYLSRTQSTGGTQGTQQLLFSQAGPANMSAQAKNWLPGPCYRQQRVSTTLSQNNNSNFAWTGATKYHLNGRDSLVNPGVAMATHKDDEERFFPSSGVLMFGKQGAGRDNVDYSSVMLTSEEEIKTTNPVATEQYGVVADNLQQTNTGPIVGNVNSQGALPGMVWQNRDVYLQGPIWAKIPHTDGNFHPSPLMGGFGLKHPPPQILIKNTPVPADPPTTFSQAKLASFITQYSTGQVSVEIEWELQKENSKRWNPEIQYTSNYYKSTNVDFAVNTEGTYSEPRPIGTRYLTRNL

SEQ ID NO: 4878 - DNA, 2217 bp, Adeno-associated virus
atggctgctgacggttatcttccagattggctcgaggacaacctctctgagggcattcgcgagtggtgggacctgaaacctggagcccccaagcccaaggccaaccagcagaagcaggacgacggccggggtctggtgcttcctggctacaagtacctcggacccttcaacggactcgacaagggggagcccgtcaacgcggcggacgcagcggccctcgagcacgacaaggcctacgaccagcagctcaaagcgggtgacaatccgtacctgcggtataaccacgccgacgccgagtttcaggagcgtctacaagaagatacgtcttttgggggcaacctcgggcgagcagtcttccaggccaagaagcgggttctcgaacctctcggtccggttgaggaagctgctaagacggctcctggaaagaagagaccggtagaaccgccacctcagcgttcccccgactcctccacgggcatcggcaagaaaggccagcagcccgctaaaaagagactgaactttggtcagactggcgactcagagtcagtccccgaccctcaaccaatcggagaaccaccagcaggcccctctggtctgggatctggtacaatggctgcaggcggtggcgctccaatggcagacaataacgaaggcgccgacggagtgggtagttcctcaggaaattggcattgcgattccacatggctgggcgacagagtcatcaccaccagcacccgaacctgggccctgcccacctacaacaaccacctctacaagcaaatatccaatgggacatcgggaggaagcaccaacgacaacacctacttcggctacagcaccccctgggggtattttgacttcaacagattccactgccacttctcaccacgtgactggcagcgactcatcaacaacaactggggattccggccaaaaagactcagcttcaagctcttcaacatccaggtcaaggaggtcacgcagaatgaaggcaccaagaccgtcgccaataaccttaccagcacgattcaggtatttacggactcggaataccagctgccgtacgtcctcggctccgcgcaccagggctgcctgcctccgttcccggcggacgtcttcatgattccccagtacggctaccttacactgaacaatggaagtcaagccgtaggccgttcctccttctactgcctggaatattttccatctcaaatgctgcgaactggaaacaattttgaattcagctacaccttcgaggacgtgcctttccacagcagctacgcacacagccagagcttggaccgactgatgaatcctctcatcgaccagtacctgtactacttatccagaactcagtccacaggaggaactcaaggtacccagcaattgttattttctcaagctgggcctgcaaacatgtcggctcaggctaagaactggctacctggaccttgctaccggcagcagcgagtctctacgacactgtcgcaaaacaacaacagcaactttgcttggactggtgccaccaaatatcacctgaacggaagagactctttggtaaatcccggtgtcgccatggcaacccacaaggacgacgaggaacgcttcttcccgtcgagtggagtcctgatgtttggaaaacagggtgctggaagagacaatgtggactacagcagcgttatgctaaccagcgaagaagaaattaaaaccactaaccctgtagccacagaacaatacggtgtggtggctgacaacttgcagcaaaccaatacagggcctattgtgggaaatgtcaacagccaaggagccttacctggcatggtctggcagaaccgagacgtgtacctgcagggtcccatctgggccaagattcctcacacggacggcaacttccacccttcaccgctaatgggaggatttggactgaagcacccacctcctcagatcctgatcaagaacacgccggtacctgcggatcctccaacaacgttcagccaggcgaaattggcttccttcattacgcagtacagcaccggacaggtcagcgtggaaatcgagtgggagctgcagaaggagaacagcaaacgttggaacccagagattcagtacacttcaaactactacaaatctacaaatgtggactttgctgtcaatacagagggaacttattctgagcctcgccccattggtactcgttacctcacccgtaatctgtaa

SEQ ID NO: 4879 - protein, 738 aa, Adeno-associated virus
MAADGYLPDWLEDNLSEGIREWWDLKPGAPKPKANQQKQDDGRGLVLPGYKYLGPFNGLDKGEPVNAADAAALEHDKAYDQQLKAGDNPYLRYNHADAEFQERLQEDTSFGGNLGRAVFQAKKRVLEPLGLVEEAAKTAPGKKRPVEPSPQRSPDSSTGIGKKGQQPAKKRLNFGQTGDSESVPDPQPIGEPPAGPSGLGSGTMAAGGGAPMADNNEGADGVGSSSGNWHCDSTWLGDRVITTSTRTWALPTYNNHLYKQISNGTSGGSTNDNTYFGYSTPWGYFDFNRFHCHFSPRDWQRLINNNWGFRPKRLSFKLFNIQVKEVTQNEGTKTIANNLTSTIQVFTDSEYQLPYVLGSAHQGCLPPFPADVFMIPQYGYLTLNNGSQAVGRSSFYCLEYFPSQMLRTGNNFEFSYTFEDVPFHSSYAHSQSLDRLMNPLIDQYLYYLSRTQSTGGTQGTQQLLFSQAGPANMSAQAKNWLPGPCYRQQRVSTTLSQSNNSNFAWTGATKYHLNGRDSLVNPGVAMATHKDDEERFFPSSGVLMFGKQGAGRDNVDYSSVMLTSEEEIKTTNPVATEQYGVVADNLQQTNTGPIVGNVNSQGALPGMVWQNRDVYLQGPIWAKIPHTDGNFHPSPLMGGLGLKHPPPQILIKNTPVPADPPTTFSQAKLASFITQYSTGQVSVEIEWELQKENSKRWNPEIQYTSNYYKSTNVDFAVNTEGTYSEPRPIGTRYLTRNL

SEQ ID NO: 4880 - DNA, 2217 bp, Adeno-associated virus
atggctgctgacggttatcttccagattggctcgaggacaacctctctgagggcattcgcgagtggtgggacctgaaacctggagcccccaagcccaaggccaaccagcagaagcaggacgacggccggggtctggtgcttcctggctacaagtacctcggacccttcaacggactcgacaagggggagcccgtcaacgcggcggacgcagcggccctcgagcacgacaaggcctacgaccagcagctcaaagcgggtgacaatccgtacctgcggtataaccacgccgacgccgagtttcaggagcgtctgcaagaagatacgtcttttgggggcaacctcgggcgagcagtcttccaggccaagaagcgggttctcgaacctctcggtctggttgaggaagcggctaagacggctcctggaaagaagagaccggtagaaccgtcacctcagcgttcccccgactcctccacgggcatcggcaagaaaggccagcagcccgctaaaaagagactgaactttggtcagactggcgactcagagtcagtccccgaccctcaaccaatcggagaaccaccagcaggcccctctggtctgggatctggtacaatggctgcaggcggtggcgctccaatggcagacaataacgaaggcgccgacggagtgggtagttcctcaggaaattggcattgcgattccacatggctgggcgacagagtcatcaccaccagcacccgaacctgggccctgcccacctacaacaaccacctctacaagcaaatatccaatgggacatcgggaggaagcaccaacgacaacacctacttcggctacagcaccccctgggggtattttgacttcaacagattccactgccacttctcaccacgtgactggcagcgactcatcaacaacaactggggattccggccaaaaagactcagcttcaagctcttcaacatccaggtcaaggaggtcacgcagaatgaaggcaccaagaccatcgccaataaccttaccagcacgattcaggtatttacggactcggaataccagctgccgtacgtcctcggctccgcgcaccagggctgcctgcctccgttcccggcggacgtcttcatgattccccagtacggctaccttacactgaacaatggaagtcaagccgtaggccgttcctccttctactgcctggaatattttccatctcaaatgctgcgaactggaaacaattttgaattcagctacaccttcgaggacgtgcctttccacagcagctacgcacacagccagagcttggaccgactgatgaatcctctcatcgaccagtacctgtactacttatccagaactcagtccacaggaggaactcaaggtacccagcaattgttattttctcaagctgggcctgcaaacatgtcggctcaggctaagaactggctacctggaccttgctaccggcagcagcgagtctctacgacactgtcgcaaagcaacaacagcaactttgcttggactggtgccaccaaatatcacctgaacggaagagactctttggtaaatcccggtgtcgccatggcaacccacaaggacgacgaggaacgcttcttcccgtcgagtggagtcctgatgtttggaaaacagggtgctggaagagacaatgtggactacagcagcgttatgctaaccagcgaagaagaaattaaaaccactaaccctgtagccacagaacaatacggtgtggtggctgacaacttgcagcaaaccaatacagggcctattgtgggaaatgtcaacagccaaggagccttacctggcatggtctggcagaaccgagacgtgtacctgcagggtcccatctgggccaagattcctcacacggacggcaacttccacccttcaccgctaatgggaggacttggactgaagcacccacctcctcagatcctgatcaagaacacgccggtacctgcggatcctccaacaacgttcagccaggcgaaattggcttccttcattacgcagtacagcaccggacaggtcagcgtggaaatcgagtgggagctgcagaaggagaacagcaaacgctggaacccagagattcagtacacttcaaactactacaaatctacaaatgtggactttgctgtcaatacagagggaacttattctgagcctcgccccattggtactcgttacctcacccgtaatctgtaa

SEQ ID NO: 4881 - protein, 737 aa, Adeno-associated virus
MAADGYLPDWLEDNLSEGIREWWDLKPGAPKPKANQQKQDDGRGLVLPGYKYLGPFNGLDKGEPVNAADAAALEHDKAYDQQLKAGDNPYPRYNHADAEFQERLQEDTPFGGNLGRAVFQAKKRVLEPLGLVEEAAKTAPGKKRPVEPSPQRSPDSSTGIGKKGQQPAKKRLNFGQTGDSESVPDPQPIGEPPAGPSGLGSGTMAAGGGAPMADNNEGADGVGNASGNWHCDSTWLGDRVITTSTRTWALPTYNNHLYKQISSASTGASNDNHYFGYSTPWGYFDFNRFHCHFSPRDWQRLINNNWGFRPKRLNFKLFNIQVKEVTTNDGVTTIANNLTSTVQVFSDSEYQLPYVLGSAHQGCLPPFPADVFMIPQYGYLTLNNGSQAVGRSSFYCLEYFPSQMLRTGNNFTFSYTFEEVPLHSSYAHSQSLDRLMNPLIVQYLYYLNRTQNQSGSAQNKDLLFSRGSPAGMSVQPKNWLPGPCYRQQRVSKTKTDNNNSNFTWTGASKYNLNGRESIINPGTAMASHKDDEDKFFPMSGVMIFGKESAGASNTALDNVMITDEEEIKATNPVATERFGTVAVNFQSSSTDPATGDVHAMGALPGMVWQDRDVYLQGPIWAKIPHTDGHFHPSPLMGGFGLKNPPPQILIKNTPVPANPPAEFSATKFASFITQYSTGQVSVEIEWELQKENSKRWNPEVQYTSNYAKSASVDFTVDNNGLYTEPRPIGTRYLTRPL

SEQ ID NO: 4882 - protein, 737 aa, Adeno-associated virus
MAADGYLPDWLEDNLSEGIREWWDLKPGAPKPKANQQKQDDGRGLVLPGYKYLGPFNGLDKGEPVNAADAAALEHDKAYDQQLKAGDNPYPRYNHADAEFQERLQEDTSFGGNLGRAVFQAKKRVLEPLGLVEEAAKTAPGKKRPVEPSPQRSPDSSTGIGKKGQQPAKKRLNFGQTGDSESVPDPQPIGEPPAGPSGLGSGTMAAGGGAPMADNNEGADGVGNASGNWHCDSTWLGDRVITTSTRTWALPTYNNHLYKQISSASTGASNDNHYFGYSTPWGYFDFNRFHCHFSPRDWQRLINNNWGFRPKRLNFKLFNIQVKEVTTNDGVTTIANNLTSTVQVFSDSEYQLPYVLGSAHQGCLPPFPADVFMIPQYGYLTLNNGSQAVGRSSFYCLEYFPSQMLRTGNNFTFSYTFEEVPLHSSYAHSQSLDRLMNPLIDQYLYYLNRTQNQSGSAQNKDLLFSRGSPAGMSVQPKNWLPGPCYRQQRVSKTKTDNNNSNFTWTGASKYNLNGRESIINPGTAMASHKDDEDKFFPMSGVMIFGKESAGASNTALDNVMITDEEEIKATNPVATERFGTVAVNFQSSSTDPATGDVHAMGALPGMVWQDRDVYLQGPIWAKIPHTDGHFHPSPLMGGFGLKNPPPQILIKNTPVPANPPAEFSATKFASFITQYSTGQVSVEIEWELQKENSKRWNPEVQYTSNYAKSASVDFTVDNNGLYTEPRPIGTRYLTRPL

SEQ ID NO: 4883 - DNA, 2214 bp, Adeno-associated virus
atggctgctgacggttatcttccagattggctcgaggacaacctctctgagggcattcgcgagtggtgggacctgaaacctggagcccccaagcccaaggccaaccagcagaagcaggacgacggccggggtctggtgcttcctggctacaagtacctcggacccttcaacggactcgacaagggggagcccgtcaacgcggcggacgcagcggccctcgagcacgacaaggcctacgaccagcagctcaaagcgggtgacaatccgtacccgcggtataaccacgccgacgccgagtttcaggagcgtctgcaagaagatacgccttttgggggcaacctcgggcgagcagtcttccaggccaagaagcgggttctcgaacctctcggtctggttgaggaagctgctaagacggctcctggaaagaagagaccggtagaaccgtcacctcagcgttcccccgactcctccacgggcatcggcaagaaaggccagcagcccgctaaaaagagactgaactttggtcagactggcgactcagagtcagtccccgaccctcaaccaatcggagaaccaccagcaggcccctctggtctgggatctggtacaatggctgcaggcggtggcgctccaatggcagacaataacgaaggcgccgacggagtgggtaatgcctcaggaaattggcattgcgattccacatggctgggcgacagagtcatcaccaccagcacccgcacctgggccttgcccacctacaataaccacctctacaagcaaatctccagtgcttcaacgggggccagcaacgacaaccactacttcggctacagcaccccctgggggtattttgatttcaacagattccactgccacttttcaccacgtgactggcagcgactcatcaacaacaattggggattccggcccaagagactcaacttcaaactcttcaacatccaagtcaaggaggtcacgacgaatgatggcgtcacaaccatcgctaataaccttaccagcacggttcaagtcttctcggactcggagtaccagcttccgtacgtcctcggctctgcgcaccagggctgcctccctccgttcccggcggacgtgttcatgattccgcaatacggctacctgacgctcaacaatggcagccaagccgtgggacgttcatccttttactgcctggaatatttcccttctcagatgctgagaacgggcaacaactttaccttcagctacacctttgaggaagtgcctctccacagcagctacgcgcacagccagagcctggaccggctgatgaatcctctcatcgtccaatacctgtattacctgaacagaactcaaaatcagtccggaagtgcccaaaacaaggacttgctgttcagccgtgggtctccagctggcatgtctgttcagcccaaaaactggctacctggaccctgttatcggcagcagcgcgtttctaaaacaaaaacagacaacaacaacagcaattttacctggactggtgcttcaaaatataacctcaatgggcgtgaatccatcatcaaccctggcactgctatggcctcacacaaagacgacgaagacaagttctttcccatgagcggtgtcatgatttttggaaaagagagcgccggagcttcaaacactgcattggacaatgtcatgattacagacgaagaggaaattaaagccactaaccctgtggccaccgaaagatttgggaccgtggcagtcaatttccagagcagcagcacagaccctgcgaccggagatgtgcatgctatgggagcattacctggcatggtgtggcaagatagagacgtgtacctgcagggtcccatttgggccaaaattcctcacacagatggacactttcacccgtctcctcttatgggcggctttggactcaagaacccgcctcctcagatcctcatcaaaaacacgcctgttcctgcgaatcctccggcggagttttcagctacaaagtttgcttcattcatcacccaatactccacaggacaagtgagtgtggaaattgaatgggagctgcagaaagaaaacagcaagcgctggaatcccgaagtgcagtacacatccaattatgcaaaatctgccagcgttgattttactgtggacaacaatggactttatactgagcctcgccccattggcacccgttaccttacccgtcccctgtaa

SEQ ID NO: 4884 - protein, 736 aa, Adeno-associated virus
MAADGYLPDWLEDTLSEGIRQWWKLRPGPPPPKPAERHKDDSRGLVLPGYKYLGPFNGLDKGEPVNEADAAALEHDKAYDRQLDSGDNPYLKYNHADAEFQERLKEDTSFGGNLGRAVFQAKKRVLEPLGLVEEGAETAPGKKRPVEQSPQGPDSSSGIGKTGQQPAKKRLNFGQTGDSESVPDPQPLGEPPATPAAVGPTTMASGGGAPMADNNEGADGVGNASGNWHCDSTWLGDRVITTSTRTWALPTYNNHLYKQISSASTGASNDNHYFGYSTPWGYFDFNRFHCHFSPRDWQRLINNNWGFRPKRLNFKLFNIQVKEVTTNDGVTTIANNLTSTVQVFSDSEYQLPYVLGSAHQGCLPPFPADVFMIPQYGYLTLNNGSQAVGRSSFYCLEYFPSQMLRTGNNFTFSYTFEEVPFHSSYAHSQSLDRLMNPLIDQYLYYPNRTQNQSGSAQNKDLLFSRGSPAGMSVQPKNWLPGPCYRQQRVSKTKTDNNNSNFTWTGASKYNLNGRESIINPGTAMASHKDDEDKFFPMSGVMIFGKESAGASNTALDNVMITDEEEIKATNPVATERFGTVAVNFQSSSTDPATGDVHAMGALPGMVWQGRDVYLQGPIWAKIPHTDGHFHPSPLMGGFGLKNPPPQILIKNTPVPANPPAEFSATKFASFITQYSTGQVSVEIEWELQKENSKRWNPEVQYTSNYAKSANVDFTVDNNGLYTEPRPIGTRYLTRPL

SEQ ID NO: 4885 - DNA, 2211 bp, Adeno-associated virus
atggctgccgatggttatcttccagattggctcgaggacactctctctgaaggaataagacagtggtggaagctcagacctggcccaccaccaccaaagcccgcagagcggcataaggacgacagcaggggtcttgtgcttcctgggtacaagtacctcggacccttcaacggactcgacaagggagagccggtcaacgaggcagacgccgcggccctcgagcacgacaaagcctacgaccggcagctcgacagcggagacaacccgtacctcaagtacaaccacgccgacgcggagtttcaggagcgccttaaagaagatacgtcttttgggggcaacctcgggcgagcagtcttccaggccaagaagcgggttctcgaacctctcggtctggttgaggaaggcgctgagacggctcctggaaagaaacgtccggtagagcagtcgccacaagggccagactcctcctcgggcatcggcaagacaggccagcagcccgctaaaaagagactcaattttggtcagactggcgactcagagtcagtccccgatccacaacctctcggagaacctccagcaacccccgctgctgtgggacctactacaatggcttcaggcggtggcgcaccaatggcagacaataacgaaggcgccgacggagtgggtaatgcctcaggaaattggcattgcgattccacatggctgggcgacagagtcatcaccaccagcacccgcacctgggccttgcccacctacaataaccacctctacaagcaaatctccagtgcttcaacgggggccagcaacgacaaccactacttcggctacagcaccccctgggggtattttgatttcaacagattccactgccacttttcaccacgtgactggcagcgactcatcaacaacaattggggattccggcccaagagactcaacttcaaactcttcaacatccaagtcaaggaggtcacgacgaatgatggcgtcacaaccatcgctaataaccttaccagcacggttcaagtcttctcggactcggagtaccagcttccgtacgtcctcggctctgcgcaccagggctgcctccctccgttcccggcggacgtgttcatgattccgcaatacggctacctgacgctcaacaatggcagccaagccgtgggacgttcatccttttactgcctggaatatttcccttctcagatgctgagaacgggcaacaactttaccttcagctacacctttgaggaagtgcctttccacagcagctacgcgcacagccagagcctggaccggctgatgaatcctctcatcgaccaatacctgtattacccgaacagaactcaaaatcagtccggaagtgcccaaaacaaggacttgctgtttagccgtgggtctccagctggcatgtctgttcagcccaaaaactggctacctggaccctgttatcggcagcagcgcgtttctaaaacaaaaacagacaacaacaacagcaattttacctggactggtgcttcaaaatataacctcaatgggcgtgaatccatcatcaaccctggcactgctatggcctcacacaaagacgacgaagacaagttctttcccatgagcggtgtcatgatttttggaaaagagagcgccggagcttcaaacactgcattggacaatgtcatgattacagacgaagaggaaattaaagccactaaccctgtggccaccgaaagatttgggaccgtggcagtcaatttccagagcagcagcacagaccctgcgaccggagatgtgcatgctatgggagcattacctggcatggtgtggcaaggtagagacgtgtacctgcagggtcccatttgggccaaaattcctcacacagatggacactttcacccgtctcctcttatgggcggctttggactcaagaacccgcctcctcagatcctcatcaaaaacacgcctgttcctgcgaatcctccggcggagttttcagctacaaagtttgcttcattcatcacccaatactccacaggacaagtgagtgtggaaattgaatgggagctgcagaaagaaaacagcaagcgctggaatcccgaagtgcagtacacatccaattatgcaaaatctgccaacgttgattttactgtggacaacaatggactttatactgagcctcgccccattggcacccgttaccttacccgtcccctgtaa

SEQ ID NO: 4886 - protein, 736 aa, Adeno-associated virus
MAADGYLPDWLEDTLSEGIRQWWKLRPGPPPPKPAERHKDDSRGLVLPGYKYLGPFNGLDKGEPVNEADAAALEHDKAYDRQLDSGDNPYLKYNHADAEFQERLKEDTSFGGNLGRAVFQAKKRVLEPLGLVEEGAKTAPGKKRPVEQSPQGPDSSSGIGKTGQQPAKKRLNFGQTGDSESVPDPQPLGEPPATPAAVGPTTMASGGGAPMADNNEGADGVGNASGNWHCDSTWLGDRVITTSTRTWALPTYNNHLYKQISSASTGASNDNHYFGYSTPWGYFDFNRFHCHFSPRDWQRLINNNWGFRPKRLNFKLFNIQVKEVTTNDGVTTIANNLTSTVQVFSDSEYQLPYVLGSAHQGCLPPFPADVFMIPQYGYLTLNNGSQAVGRSSFYCLEYFPSQMLRTGNNFTFSYTFEEVPFHSSYAHSQSLDRLMNPLIDQYLYYPNRTQNQSGSAQNKDLLFSRGSPAGMSVQPKNWLPGPCYRQQRVSKTKTDNNNSNFTWTGASKYNLNGRESIINPGTAMASHKDDEDKFFPMSGVMIFGKESAGASNTALDNVMITDEEEIKATNPVATERFGTVAVNFQSSSTDPATGDVHAMGALPGMVWQGRDVYLQGPIWAKIPHTDGHFHPSPLMGGFGLKNPPPQILIKNTPVPANPPAEFSATKFASFITQYSTGQVSVEIEWELQKENSKRWNPEVQYTSNYAKSANVDFTVDNNGLYTEPRPIGTRYLTRPL

SEQ ID NO: 4887 - protein, 736 aa, Adeno-associated virus
MAADGYLPDWLEDTLSEGIRQWWKLRPGPPPPKPAERHKDDSRGLVLPGYKYLGPFNGLDKGEPVNEADAAALEHDKAYDRQLDSGDNPYLKYNHADAEFQERLKEDTSFGGNLGRAVFQAKKRVLEPLGLVEEGAKTAPGKKRPVEQSPQGPDSSSGIGKTGQQPAKKRLNFGQTGDSESVPDPQPLGEPPATPAAVGPTTMASGGGAPMADNNEGADGVGNASGNWHCDSTWLGDRVITTSTRTWALPTYNNHLYKQISSASTGASNDNHYFGYSTPWGYFDFNRFHCHFSPRDWQRLINNNWGFRPKRLNFKLFNIQVKEVTTNDGVTTIANNLTSTVQVFSDSEYQLPYVLGSAHQGCLPPFPADVFMIPQYGYLTLNNGSQAVGRSSFYCLEYFPSQMLRTGNNFTFSYTFEEVPFHSSYAHSQSLDRLMNPLIDQYLYYLNRTQNQSGSAQNKDLLFSRGSPAGMSVQPKNWLPGPCYRQQRVSKTKTDNNNSNFTWTGASKYNLNGRESIINPGTAMASHKDDEDKFFPMSGVMIFGKESAGASNTALDNVMITDEEEIKATNPVATERFGTVAVNFQSSSTDPATGDVHAMGALPGMVWQGRDVYLQGPIWAKIPHTDGHFHPSPLMGGFGLKNPPPQILIKNTPVPANPPAEFSATKFASFITQYSTGQVSVEIEWELQKENSKRWNPEVQYTSNYAKSANVDFTVDNNGLYTEPRPIGTRYLTRPL

SEQ ID NO: 4888 - protein, 736 aa, Adeno-associated virus
MAADGYLPDWLEDTLSEGIRQWWKLRPGPPPPKPAERHKDDSRGLVLPGYKYLGPFNGLDKGEPVNEADAAALEHDKAYDRQLDSGDNPYLKYNHADAEFQERLKEDTSFGGNLGRAVFQAKKRVLEPLGLVEEGAKTAPGKKRPVEQSPQGPDSSSGIGKTGQQPAKKRLNFGQTGDSESVPDPQPLGEPPATPAAVGPTTMASGGGAPMADNNEGADGVGNASGNWHCDSTWLGDRVITTSTRTWALPTYNNHLYKQISSASTGASNDNHYFGYSTPWGYFDFNRFHCHFSPRDWQRLINNNWGFRPKRLNFKLFNIQVKEVTTNDGVTTIANNLTSTVQVFSDSEYQLPYVLGSAHQGCLPPFPADVFMIPQYGYLTLNNGSQAVGRSSFYCLEYFPSQMLRTGNNFTFSYTFEEVPFHSSYAHSQSLDRLMNPLIDQYLYYLNRTQNQSGSAQNKDLLFSRGSPAGMSVQPKNWLPGPCYRQQRVSKTKTDNNNSNFTWTGASKYNLNGRESIINPGTAMASHKDDEDKFFPMSGVMIFGKESAGASNTALDNVMITDEEEIKATNPVATERFGTVAVNFQSSSTDPATGDVHAMGALPGMVWQDRDVYLQGPIWAKIPHTDGHFHPSPLMGGFGLKNPPPQILIKNTPVPANPPAEFSATKFASFITQYSTGQVSVEIEWELQKENSKRWNPEVQYTSNYAKSANVDFTVDNNGLYTEPRPIGTRYLTRPL

SEQ ID NO: 4889 - DNA, 2208 bp, Adeno-associated virus
atggctgccgatggctatcttccagattggctcgaggacactctctctgaaggaataagacagtggtggaagctcaaacctggcccaccaccaccaaagcccgcagagcggcatagggacgacagcaggggtcttgtgcttcctgggtacaagtacctcggacccttcaacggactcgacaagggagagccggtcaacgaggcagacgccgcggccctcgagcacgacaaagcctacgaccggcagctcgacagcggagacaacccgtacctcaagtacaaccacgccgacgcggagtttcaggagcgccttaaagaagatacgtcttttgggggcaacctcggacgagcagtcttccaggcgaaaaagagggttcttgaacctctgggcctggttgaggaacctgttaagacggctccgggaaaaaagaggccggtagagcactctcctgtggagccagactcctcctcgggaaccggaaaggcgggccagcagcctgcaagaaaaagattgaattttggtcagactggagacgcagactcagtacctgacccccagcctctcggacagccaccagcagccccctctggtctgggaactaatacgatggctacaggcagtggcgcaccaatggcagacaataacgagggcgccgacggagtgggtaattcctcgggaaattggcattgcgattccacatggatgggcgacagagtcatcaccaccagcacccgaacctgggccctgcccacctacaacaaccacctctacaaacaaatttccagccaatcaggagcctcgaacgacaatcactactttggctacagcaccccttgggggtattttgacttcaacagattccactgccacttttcaccacgtgactggcaaagactcatcaacaacaactggggattccgacccaagagactcaacttcaagctctttaacattcaagtcaaagaggtcacgcagaatgacggtacgacgacgattgccaataaccttaccagcacggttcaggtgtttactgactcggggtaccagctcccgtacgtcctcggctcggcgcatcaaggatgcctcccgccgttcccagcagacgtcttcatggtgccacagtatggataccccaccctgaacaacgggagtcaggcagtaggacgctcttcattttactgcctggagtactttccttctcagatgctgcgtaccggaaacaactttaccttcagctacacttttgaggacgttcctttccacagcagctacgctcacagccagagtctggaccgtctcatgaatcctctcatcgaccagtacctgtattacttgagcacaacaaacactccaagtggaaccaccacgcagtcaaggcttcagttttctcaggccggagcgagtgacattcgggaccagtctaggaactggcttcctggaccctgttaccgccagcagcgagtatcaaagacatctgcggataacaacaacagtgaatactcgtggactggagctaccaagtaccacctcaatggcagagactctctggtgaatccgggcccggccgtggcaagccacaaggacgatgaagaaaagttttttcctcagagcggggttctcatctttgggaagcaaggctcagagaaaacaaatgtggacattgaaaaggtcatgattacagacgaagaggaaatcaggacaaccaatcccgtggctacggagcagtatggttctgtatctaccaacctccagagaggcaacagacaagcagctaccgcagatgtcaacacacaaggcgttcttccaggcatggtctggcaggacagagatgtgtaccttcaggggcccatctgggcaaagattccacacacggacggacattttcacccctctcccctcatgggtggattcggacttaaacaccctcctccacagattctcatcaagaacaccccggtacctgcgaatccttcgaccaccttcagtgcggcaaagtttgcttccttcatcacacagtactccacgggacaggtcagcgtggagatcgagtgggagctgcagaaggaaaacagcaaacgctggaatcccgaaattcagtacacttccaactacaacaagtctgttaatgtggactttactgtggacactaatggcgtgtattcagagcctcgccccattggcaccagatacctgactcgtaatctgtaa

SEQ ID NO: 4890 - protein, 735 aa, Adeno-associated virus
MAADGYLPDWLEDTLSEGIRQWWKLKPGPPPPKPAERHRDDSRGLVLPGYKYLGPFNGLDKGEPVNEADAAALEHDKAYDRQLDSGDNPYLKYNHADAEFQERLKEDTSFGGNLGRAVFQAKKRVLEPLGLVEEPVKTAPGKKRPVEHSPVEPDSSSGTGKAGQQPARKRLNFGQTGDADSVPDPQPLGQPPAAPSGLGTNTMATGSGAPMADNNEGADGVGNSSGNWHCDSTWMGDRVITTSTRTWALPTYNNHLYKQISSQSGASNDNHYFGYSTPWGYFDFNRFHCHFSPRDWQRLINNNWGFRPKRLNFKLFNIQVKEVTQNDGTTTIANNLTSTVQVFTDSGYQLPYVLGSAHQGCLPPFPADVFMVPQYGYPTLNNGSQAVGRSSFYCLEYFPSQMLRTGNNFTFSYTFEDVPFHSSYAHSQSLDRLMNPLIDQYLYYLSTTNTPSGTTTQSRLQFSQAGASDIRDQSRNWLPGPCYRQQRVSKTSADNNNSEYSWTGATKYHLNGRDSLVNPGPAVASHKDDEEKFFPQSGVLIFGKQGSEKTNVDIEKVMITDEEEIRTTNPVATEQYGSVSTNLQRGNRQAATADVNTQGVLPGMVWQDRDVYLQGPIWAKIPHTDGHFHPSPLMGGFGLKHPPPQILIKNTPVPANPSTTFSAAKFASFITQYSTGQVSVEIEWELQKENSKRWNPEIQYTSNYNKSVNVDFTVDTNGVYSEPRPIGTRYLTRNL

SEQ ID NO: 4891 - DNA, 2211 bp, Adeno-associated virus
atggctgccgacggttatcttccagattggctcgaggacactctctctgaaggaataagacagtggtggaagctcaaacctggcccaccaccaccaaagcccgcagagcggcataaggacgacagcaggggtcttgtgcttcctgggtacaagtacctcggacccttcaacggactcgacaagggagagccggtcaacgaggcagacgccgcggccctcgagcacgacaaagcctacgaccggcagctcgacagcggagacaacccgtacctcaagtacaaccacgccgacgcggagtttcaggagcgccttaaagaagatacgtcttttgggggcaacctcgggcgggcagtcttccaggccaagaagcgggttctcgaacctctcggtctggttgaggaaggcgctaagacggctcctggaaagaaacgtccggtagagcagtcgccacaagagccagactccccctcgggcatcggcaagacaggccagcagcccgctaaaaagagactcaattttggtcagactggcgactcagagtcagtccccgatccacaacctctcggagaacctccagcaacccccgctgctgtgggacctactacaatggcttcaggcggtggcgcaccaatggcagacaataacgaaggcgccgacggagtgggtaatgcctcaggaaattggcactgcgattccacatggctgggcgacagagtcatcaccaccagcacccgcacctgggccttgcccacctacaataaccacctctacaagcaaatctccagtgcttcaacgggggccagcaacgacaaccactacttcggctacagcaccccctgggggtattttgatttcaacagattccactgccacttttcaccacgtgactggcagcgactcatcaacaacaattggggattccggcccaagagactcaacttcaaactcttcaacatccaagtcaaggaggtcacgacgaatgatggcgtcacaaccatcgctaataaccttaccagcacggttcaagtcttctcggactcggagtaccagcttccgtacgtcctcggctctgcgcaccagggccgcctccctccgttcccggcggacgtgttcatgattccgcaatacggctacctgacgctcaacaatggcagccaagccgtgggacgttcatcctcttactgcctggaatatttcccttctcagatgctgagaacgggcaacaactttaccttcagctacacctttgaggaagtgcctctccacagcagctgcgcgcacagccagagcctggaccggctgatgaatcctctcatcgaccaatacctgtattacctgaacagaactcaaaatcagtccggaagtgcccaaaacagggacttgctgttcagccgtgggtctccagctggcatgtctgttcagcccaaaaactggctacctggaccctgttatcggcagcagcgcgtttctaaaacaaaaacagacaacaacaacagcaattttacctggactggtgcttcaaaatataacctcaatgggcgtgaatccatcatcaaccctggcactgctatggcctcacacaaagacgacgaagacaagttctttcccatgagcggtgtcatgatttttggaaaagagagcgccggagcttcaaacactgcattggacaatgtcatgattacagacgaagaggaaattaaagccactaaccctgtggccaccgaaagatttgggaccgtggcagtcaatttccagagcagcagcacagaccctgcgaccggagatgtgcatgctatgggagcattacctggcatggtgtggcaagatagagacgtgtacctgcagggtcccatttgggccaaaattcctcacacagatggacactttcacccgtctcctcttatgggcggctttggactcaagaacccgcctcctcagatcctcatcaaaaacacgcctgttcctgcgaatcctccggcggagttttcagctacaaagtttgcttcattcatcacccaatactccgcaggacaagtgagtgtggaaattgaatgggagctgcagaaagaaaacagcaagcgctggaatcccgaagtgcagtacacatccaattatgcaaaatctgccaacgttgattttactgtggacaacaatggactttatactgagcctcgccccattggcacccgttaccttacccgtcccctgtaa

SEQ ID NO: 4892 - protein, 736 aa, Adeno-associated virus
MAADGYLPDWLEDTLSEGIRQWWKLKPGPPPPKPAERHKDDSRGLVLPGYKYLGPFNGLDKGEPVNEADAAALEHDKAYDRQLDSGDNPYLKYNHADAEFQERLKEDTSFGGNLGRAVFQAKKRVLEPLGLVEEGAKTAPGKKRPVEQSPQEPDSPSGIGKTGQQPAKKRLNFGQTGDSESVPDPQPLGEPPATPAAVGPTTMASGGGAPMADNNEGADGVGNASGNWHCDSTWLGDRVITTSTRTWALPTYNNHLYKQISSASTGASNDNHYFGYSTPWGYFDFNRFHCHFSPRDWQRLINNNWGFRPKRLNFKLFNIQVKEVTTNDGVTTIANNLTSTVQVFSDSEYQLPYVLGSAHQGRLPPFPADVFMIPQYGYLTLNNGSQAVGRSSSYCLEYFPSQMLRTGNNFTFSYTFEEVPLHSSCAHSQSLDRLMNPLIDQYLYYLNRTQNQSGSAQNRDLLFSRGSPAGMSVQPKNWLPGPCYRQQRVSKTKTDNNNSNFTWTGASKYNLNGRESIINPGTAMASHKDDEDKFFPMSGVMIFGKESAGASNTALDNVMITDEEEIKATNPVATERFGTVAVNFQSSSTDPATGDVHAMGALPGMVWQDRDVYLQGPIWAKIPHTDGHFHPSPLMGGFGLKNPPPQILIKNTPVPANPPAEFSATKFASFITQYSAGQVSVEIEWELQKENSKRWNPEVQYTSNYAKSANVDFTVDNNGLYTEPRPIGTRYLTRPL

SEQ ID NO: 4893 - protein, 736 aa, Adeno-associated virus
MAADGYLPDWLEDTLSEGIRQWWKLKPGPPPPKPAERHKDDSRGLVLPGYKYLGPFNGLDKGEPVNEADAAALEHDKAYDRQLDSGDNPYLKYNHADAEFQERLKEDTSFGGNLGRAVFQAKKRVLEPLGLVEEGAKTAPGKKRPVEQSPQEPDSSSGIGKTGQQPAKKRLNFGQTGDSESVPDPQPLGEPPATPAAVGPTTMASGGGAPMADNNEGADGVGNASGNWHCDSTWLGDRVITTSTRTWALPTYNNHLYKQISSASTGASNDNHYFGYSTPWGYFDFNRFHCHFSPRDWQRLINNNWGFRPKRLNFKLFNIQVKEVTTNDGVTTIANNLTSTVQVFSDSEYQLPYVLGSAHQGCLPPFPADVFMIPQYGYLTLNNGSQAVGRSSFYCLEYFPSQMLRTGNNFTFSYTFEEVPLHSSCAHSQSLDRLMNPLIDQYLYYLNRTQNQSGSAQNRDLLFSRGSPAGMSVQPKNWLPGPCYRQQRVSKTKTDNNNSNFTWTGASKYNLNGRESIINPGTAMASHKDDEDKFFPMSGVMIFGKESAGASNTALDNVMITDEEEIKATNPVATERFGTVAVNFQSSSTDPATGDVHAMGALPGMVWQDRDVYLQGPIWAKIPHTDGHFHPSPLMGGFGLKNPPPQILIKNTPVPANPPAEFSATKFASFITQYSTGQVSVEIEWELQKENSKRWNPEVQYTSNYAKSANVDFTVDNNGLYTEPRPIGTRYLTRPL

SEQ ID NO: 4894 - DNA, 2208 bp, Adeno-associated virus
atggctgccgatggctatcttccagattggctcgaggacactctctctgaaggaataagacagtggtggaagctcaaacctggcccaccaccaccaaagcccgcagagcggcatagggacgacagcaggggtcttgtgcttcctgggtacaagtacctcggacccttcaacggactcgacaagggagagccggtcaacgaggcagacgccgcggccctcgagcacgacaaagcctacgaccggcagctcgacagcggagacaacccgtacctcaagtacaaccacgccgacgcggagtttcaggagcgccttaaagaagatacgtcttttgggggcaacctcggacgagcagtcttccaggcgaaaaagagggttcttgaacctctgggcctggttggggaacctgttaagacggctccgggaaaaaagaggccggtagagcactctcctgtggagccagactcctcctcgggaaccggaaaggcgggccagcagcctgcaagaaaaagattgaattttggtcagactggagacgcagactcagtacctgacccccagcctctcggacagccaccagcagccccctctggtctgggaactaatacgatggctacaggcagtggcgcaccaatggcagacaataacgagggcgccgacggagtgggtaattcctcgggaaattggcattgcgattccacatggatgggcgacagagtcatcaccaccagcacccgaacctgggccctgcccacctacaacaaccacctctacaaacaaatttccagccaatcaggagcctcgaacgacagtcactactttggctacagcaccccttgggggtattttgacttcaacagattccactgccacttttcaccacgtgactggcaaagactcatcaacaacaactggggattccgacccaagagactcaacttcaagctctttaacattcaagtcaaagaggtcacgcagaatgacggtacgacgacgattgccaataaccttaccagcacggttcaggtgtttactgactcggagtaccagctcccgtacgtcctcggctcggcgcatcaaggatgcctcccgccgttcccagcagacgtcttcatggtgccacagtatggatacctcaccctgaacaacgggagtcaggcagtaggacgctcttcattttactgcctggagtactttccttctcagatgctgcgtaccggaaacaactttaccttcagctacacttttgaggacgttcctttccacagcagctacgctcacagccagagtctggaccgtctcatgaatcctctcatcgaccagtacctgtattacttgagcacaacaaacactccaagtggaaccaccacgcagtcaaggctccagttttctcaggccggagcgagtgacattcgggaccagtctaggaactggcttcctggaccctgttaccgccagcagcgagtatcaaagacatctgcggataacaacaacagtgaatactcgtggactggagctaccaagtaccacctcaatggcagagactctctggtgaatccgggcccggccatggcaagccacaaggacaatgaagaaaagttttttcctcagagcggggttctcatctttgggaagcaaggctcagagaaaacaaatgtggacattgaaaaggtcatgattacagacgaagaggaaatcaggacaaccaatcccgtggctacggagcagtatggttctgtatctaccaacctccagagaggcaacagacaagcagctaccgcagatgtcaacacacaaggcgttcttccaggcatggtctggcaggacagagatgtgtaccttcaggggcccatctgggcaaagattccacacacggacggacattttcacccctctcccctcatgggtggattcggacttaaacaccctcctccacagattctcatcaagaacaccccggtacctgcgaatccttcgaccaccttcagtgcggcaaagtttgcttccttcatcacacagtactccacgggacaggtcagcgtggagatcgagtgggagctgcagaaggaaaacagcaaacgctggaatcccgaaattcagtacacttccaactacaacaagtctgttaatgtggactttactgtggacactaatggcgtgtattcagagcctcgccccattggcaccagatacctgactcgtaatctgtaa

SEQ ID NO: 4895 - protein, 735 aa, Adeno-associated virus
MAADGYLPDWLEDTLSEGIRQWWKLKPGPPPPKPAERHRDDSRGLVLPGYKYLGPFNGLDKGEPVNEADAAALEHDKAYDRQLDSGDNPYLKYNHADAEFQERLKEDTSFGGNLGRAVFQAKKRVLEPLGLVGEPVKTAPGKKRPVEHSPVEPDSSSGTGKAGQQPARKRLNFGQTGDADSVPDPQPLGQPPAAPSGLGTNTMATGSGAPMADNNEGADGVGNSSGNWHCDSTWMGDRVITTSTRTWALPTYNNHLYKQISSQSGASNDSHYFGYSTPWGYFDFNRFHCHFSPRDWQRLINNNWGFRPKRLNFKLFNIQVKEVTQNDGTTTIANNLTSTVQVFTDSEYQLPYVLGSAHQGCLPPFPADVFMVPQYGYLTLNNGSQAVGRSSFYCLEYFPSQMLRTGNNFTFSYTFEDVPFHSSYAHSQSLDRLMNPLIDQYLYYLSTTNTPSGTTTQSRLQFSQAGASDIRDQSRNWLPGPCYRQQRVSKTSADNNNSEYSWTGATKYHLNGRDSLVNPGPAMASHKDNEEKFFPQSGVLIFGKQGSEKTNVDIEKVMITDEEEIRTTNPVATEQYGSVSTNLQRGNRQAATADVNTQGVLPGMVWQDRDVYLQGPIWAKIPHTDGHFHPSPLMGGFGLKHPPPQILIKNTPVPANPSTTFSAAKFASFITQYSTGQVSVEIEWELQKENSKRWNPEIQYTSNYNKSVNVDFTVDTNGVYSEPRPIGTRYLTRNL

SEQ ID NO: 4896 - protein, 737 aa, Adeno-associated virus
RMAADGYLPDWLEDNLSEGIREWWDLKPGAPKPKANQQKQDDGRGLVLPGYKYLGPFNGLDKGEPVNAADAAALEHDKAYDQQLKAGDNPYLRYNHADAEFQERLQEDTSFGGNLGRAVFQAKKRVLEPLGLVEEGAKTAPGKKRPVEQSPQEPDSSSGIGKTGQQPAKKRLNFGQTGDSESVPDPQPLGEPPATPAAVGPTTMASGGGAPMADNNEGADGVGNASGNWHCDSTWLGDRVITTSTRTWALPTYNNHLYKQISSTSTGASNDNHYFGYGTPWGYFDFNRFHCHFSPRDWQRLINNNWGFRPKRLNFKLFNIQVEEVTTNDGVTTIANNLTSTVQVFSDSEYQLPYVLGSAHQGCLPPFPADVFMIPQYGYLTLNNGSQAVGRSSFYCLEYFPSQMLRTGNNFTFSYTFEEVPFHSSYAHSQSLDRLMNPLIDQYLYYLNRTQNQSGSAQNKDLLFSRGSPAGMSVQPKNWLPGPCYRQQRVSKTKTDNNNSNFTWTGASKYNLNGRESIINPGTAVASHKDDEDKFFPMSGVMIFGKESAGASSTALDNVMITDEEEIKATNPVATERFGTVAVNFQSSSTDPATGDVHAMGALPGMVWQDRDVYLQGPIWAKIPHTDGHFHPSPLMGGFGLKNPPPQILIKNTPVPANPPAEFSATKFASFITQYSTGQVSVEIEWELQKENSKRWNPEVQYTSNYAKSANVDFTVDNNGLYTEPRPIGTRYLTRPL

SEQ ID NO: 4897 - protein, 736 aa, Adeno-associated virus
MAADGYLPDWLEDNLSEGIREWWDLKPGAPKPKANQQKQDDGRGLVLPGYKYLGPFNGLDKGEPVNAADAAALEHDKAYDQQLKAGDNPYLRYNHADAEFQERLQEDTSFGGNLGRAVFQAKKRVLEPLGLVEEGAKTAPGKKRPVEQSPQEPDSSSGIGKTGQQPAKKRLNFGQTGDSESVPDPQPLGEPPATPAAVGPTTMASGGGAPMADNNEGADGVGNASGNWHCDSTWLGDRVITTSTRTWALPTYNNHLYKQISSTSTGASNDNHYFGYGTPWGYFDFNRFHCHFSPRDWQRLINNNWGFRPKRLNFKLFNIQVEEVTTNDGVTTIANNLTSTVQVFSDSEYQLPYVLGSAHQGCLPPFPADVFMIPQYGYLTLNNGSQAVGRSSFYCLEYFPSQMLRTGNNFTFSYTFEEVPFHSSYAHSQSLDRLMNPLIDQYLYYLNRTQNQSGSAQNKDLLFSRGSPAGMSVQPKNWLPGPCYRQQRVSKTKTDNNNSNFTWTGASKYNLNGRESIINPGTAVASHKDDEDKFFPMSGVMIFGKESAGASSTALDNVMITDEEEIKATNPVATERFGTVAVNFQSSSTDPATGDVHAMGALPGMVWQDRDVYLQGPIWAKIPHTDGHFHPSPLMGGFGLKNPPPQILIKNTPVPANPPAEFSATKFASFITQYSTGQVSVEIEWELQKENSKRWNPEVQYTSNYAKSANVDFTVDNNGLYTEPRPIGTRYLTRPL

SEQ ID NO: 4898 - DNA, 2211 bp, Adeno-associated virus
atggctgccgatggttatcttccagattggctcgaggacaacctctctgagggcattcgcgagtggtgggacttgaaacctggagccccgaagcccaaagccaaccagcaaaagcaggacgacggccggggtctggtgcttcctggctacaagtacctcggacccttcaacggactcgacaagggggagcccgtcaacgcggcggacgcagcggccctcgagcacgacaaggcctacgaccagcagctcaaagcgggtgacaatccgtacctgcggtataaccacgccgacgccgagtttcaggagcgtctgcaagaagatacgtcttttgggggcaacctcgggcgagcagtcttccaggccaagaagcgggttctcgaacctctcggtctggttgaggaaggcgctaagacggctcctggaaagaaacgtccggtagagcagtcgccacaagagccagactcctcctcgggcatcggcaagacaggccagcagcccgctaaaaagagactcaattttggccagactggcgactcagagtcagtccccgatccacaacctctcggagaacctccagcaacccccgctgctgtgggacctactacaatggcttcaggcggtggcgcaccaatggcagacaataacgaaggcgccgacggagtgggtaatgcctcaggaaattggcattgcgattccacatggctgggcgacagagtcatcaccaccagcacccgcacctgggccttgcccacctacaataaccacctctacaagcaaatctccagtacttcaacgggggccagcaacgacaaccactacttcggctacggcaccccctgggggtattttgatttcaacagattccactgccacttttcaccacgtgactggcagcgactcatcaacaacaattggggattccggcccaagagactcaacttcaaactcttcaacatccaagtcgaggaggtcacgacgaatgatggcgtcacaaccatcgctaataaccttaccagcacggttcaagtcttctcggactcggagtaccagcttccgtacgtcctcggctctgcgcaccagggctgcctccctccgttcccggcggacgtgttcatgattccgcaatacggctacctgacgctcaacaatggcagccaagccgtgggacgttcatccttttactgcctggaatatttcccttctcagatgctgagaacgggcaacaactttaccttcagctacacctttgaggaagtgcctttccacagcagctacgcgcacagccagagcctggaccggctgatgaatcctctcatcgaccaatacctgtattacctgaacagaacacaaaatcagtccggaagtgcccaaaacaaggacttgctgtttagccgtgggtctccagctggcatgtctgttcagcccaaaaactggctacctggaccctgttatcggcagcagcgcgtttctaaaacaaaaacagacaacaacaacagcaattttacctggactggtgcttcaaaatataacctcaatgggcgtgaatccatcatcaaccctggcaccgctgtggcctcacacaaagacgacgaagacaagttctttcccatgagcggtgtcatgatttttggaaaagagagcgccggagcttcaagcactgcattggacaatgtcatgattacagacgaagaggaaattaaagccactaaccctgtggccaccgaaagatttgggaccgtggcagtcaatttccagagcagcagcacagaccctgcgaccggagatgtgcatgctatgggagcattacctggcatggtgtggcaagatagagacgtgtacctgcagggtcccatttgggccaaaattcctcacacagatggacactttcacccgtctcctcttatgggcggctttggactcaagaacccgcctcctcagatcctcatcaaaaacacgcctgttcctgcgaatcctccggcggagttttcagctacaaagtttgcttcattcatcacccaatactccacaggacaagtgagtgtggaaattgaatgggagctgcagaaagaaaacagcaagcgctggaatcccgaagtgcagtacacatccaattatgcaaaatctgccaacgttgattttactgtggacaacaatggactttatactgagcctcgccccattggcacccgttaccttacccgtcccctgtaa

SEQ ID NO: 4899 - protein, 737 aa, Adeno-associated virus
RMAADGYLPDWLEDNLSEGIREWWDLKPGAPKPKANQQKQDDGRGLVLPGYKYLGPFNGLDKGEPVNAADAAALEHDKAYDQQLKAGDNPYLRYNHADAEFQERLQEDTSFGGNLGRAVFQAKKRVLEPLGLVEEGAKTAPGKKRPVEQSPQEPDSSSGIGKTGQQPAKKRLNFGQTGDSESVPDPQPLGEPPATPAAVGPTTMASGGGAPMADNNEGADGVGNASGNWHCDSTWLGDRVITTSTRTWALPTYNNHLYKQISSTSTGASNDNHYFGYSTPWGYFDFNRFHCHFSPRDWQRLINNNWGFRPKRLNFKLFNIQVEEVTTNDGVTTIANNLTSTVQVFSDSEYQLPYVLGSAHQGCLPPFPADVFMIPQYGYLTLNNGSQAVGRSSFYCLEYFPSQMLRTGNNFTFSYTFEEVPFHSSYAHSQSLDRLMNPLIDQYLYYLNRTQNQSGSAQNKDLLFSRGSPAGMSVQPKNWLPGPCYRQQRVSKTKTDNNNSNFTWTGASKYNLNGRESIINPGTAVASHKDDEDKFFPMSGVMIFGKESAGASSTALDNVMITDEEEIKATNPVATERFGTVAVNFQSSSTDPATGDVHAMGALPGMVWQDRDVYLQGPIWAKIPHTDGHFHPSPLMGGFGLKNPPPQILIKNTPVPANPPAEFSATKFASFITQYSTGQVSVEIEWELQKENSKRWNPEVQYTSNYAKSANVDFTVDNNGLYTEPRPIGTRYLTRPL

SEQ ID NO: 4900 - protein, 737 aa, Adeno-associated virus
RMAADGYLPDWLEDNLSEGIREWWDLKPGAPKPKANQQKQDDGRGLVLPGYKYLGPFNGLDKGEPVNAADAAALEHDKAYDQQLKAGDNPYLRYNHADAEFQERLQEDTSFGGNLGRAVFQAKKRVLEPLGLVEEGAKTAPGKKRPVEQSPQEPDSSSGIGKTGQQPAKKRLNFGQTGDSESVPDPQPLGEPPATPAAVGPTTMASGGGAPMADNNEGADGVGNASGNWHCDSTWLGDRVITTSTRTWALPTYNNHLYKQISSTSTGASNDNHYFGYSTPWGYFDFNRFHCHFSPRDWQRLINNNWGFRPKRLNFKLFNIQVKEVTTNDGVTTIANNLTSTVQVFSDSEYQLPYVLGSAHQGCLPPFPADVFMIPQYGYLTLNNGSQAVGRSSFYCLEYFPSQMLRTGNNFTFSYTFEEVPFHSSYAHSQSLDRLMNPLIDQYLYYLNRTQNQSGSAQNKDLLFSRGSPAGMSVQPKNWLPGPCYRQQRVSKTKTDNNNSNFTWTGASKYNLNGRESIINPGTAVASHKDDEDKFFPMSGVMIFGKESAGASSTALDNVMITDEEEIKATNPVATERFGTVAVNFQSSSTDPATGDVHAMGALPGMVWQDRDVYLQGPIWAKIPHTDGHFHPSPLMGGFGLKNPPPQILIKNTPVPANPPAEFSATKFASFITQYSTGQVSVEIEWELQKENSKRWNPEVQYTSNYAKSANVDFTVDNNGLYTEPRPIGTRYLTRPL

SEQ ID NO: 4901 - protein, 737 aa, Adeno-associated virus
RMAADGYLPDWLEDNLSEGIREWWDLKPGAPKPKANQQKQDDGRGLVLPGYKYLGPFNGLDKGEPVNAADAAALEHDKAYDQQLKAGDNPYLRYNHADAEFQERLQEDTSFGGNLGRAVFQAKKRVLEPLGLVEEGAKTAPGKKRPVEQSPQEPDSSSGIGKTGQQPAKKRLNFGQTGDSESVPDPQPLGEPPATPAAVGPTTMASGGGAPMADNNEGADGVGNASGNWHCDSTWLGDRVITTSTRTWALPTYNNHLYKQISSTSTGASNDNHYFGYSTPWGYFDFNRFHCHFSPRDWQRLINNNWGFRPKRLNFKLFNIQVKEVTTNDGVTTIANNLTSTVQVFSDSEYQLPYVLGSAHQGCLPPFPADVFMIPQYGYLTLNNGSQAVGRSSFYCLEYFPSQMLRTGNNFTFSYTFEEVPFHSSYAHSQSLDRLMNPLIDQYLYYLNRTQNQSGSAQNKDLLFSRGSPAGMSVQPKNWLPGPCYRQQRVSKTKTDNNNSNFTWTGASKYNLNGRESIINPGTAVASHKDDEDKFFPMSGVMIFGKESAGANSTALDNVMITDEEEIKATNPVATERFGTVAVNFQSSSTDPATGDVHAMGALPGMVWQDRDVYLQGPIWAKIPHTDGHFHPSPLMGGFGLKNPPPQILIKNTPVPANPPAEFSATKFASFITQYSTGQVSVEIEWELQKENSKRWNPEVQYTSNYAKSANVDFTVDNNGLYTEPRPIGTRYLTRPL

SEQ ID NO: 4902 - DNA, 2208 bp, Adeno-associated virus
atggctgccgatggttatcttccagattggctcaaggacactctctctgaaggaataagacagtggtggaagctcaaacctggcccaccaccaccaaagcccgcagagcggcataaggacgacagcgggggtcttgtgcttcctgggtacaagtacctcggacccttcaacggactcgacaagggagagccggtcaacgaggcagacgccgcggccctcgagtacgacaaggcctacgaccggcagctcgacagcggagacaacccgtacctcaagtacaaccacgccgacgcggagtttcaggagcgccttaaagaagatacgtcttttgggggcaacctcggacgagcagtcttccaggcgaaaaagagggttcttgaacctctgggcctggttgaggaacctgttaagacggctccgggaaaaaagaggccggtagagcactctcctgtggagccagactcctcctcgggaacaggaaaagcgggccagcagcctgcgagaaagagattgaattttggtcagactggagacgcagactccgtacctgacccccagcctctcggacagccaccagcagccccctctggtctgggaactaatacgatggctacaggcagtggcgcaccaatggcagacaataacgagggcgccgacggagtgggtaattcctcgggaagttggcattgcgattccacatggatgggcgacagagtcatcaccaccagcacccgaacctgggctctgcccacctacaacaaccatctgtacaagcagatctccagccaatcaggagccagcaacgacaaccactactttggctacagcaccccttgggggtattttgacttcaacagattccactgccacttttcaccacgtgactggcaaagactcatcaacaacaactggggattccggcccaagagactcaacttcaagctctttaacattcaagtcaaggaggtcacgcagaatgacggtacgacgacgattgccaataaccttaccagcacggttcaggtgtttactgactcggagtaccagctcccgtacgtccccggctcggcgcatcaaggatgcctcccgccgttcccagcagacgtcttcatggtgccacagtatggatacctcaccctgaacaacgggagtcaggcagtaggacgctcttcattttactgcctggagtactttccttctcagatgcttcgtaccggaaacaactttaccttcagctacacctttgaggatgttcctttccacagcagctacgctcacagccagagtttggaccgtctcatgaatcctctcatcgaccagtacctgtattacttgagcagaacaaacactccaagcggaaccaccacgcagtccaggcttcagttttctcaggccggagcaagtgacattcgggaccagtctaggaactggcttcctggaccctgttaccgccagcagcgagtatcaaagacagctgcggacaacaacaacagtgaatactcgtggactggagctaccaagtaccacctcaatggcagagactctctggtgaatccgggcccggccatggccagccacaaggacgatgaagaaaagttttttcctcaaagcggggttctcatctttgggaagcaaggctcagagaaaacaaatgtggacattgaaaaggtcatgattacagacgaagaggaaatcagaaccaccaatcccgtggccacggagcagtatggttctgtatctaccaacctccagagcggcaacacacaagcagctactgcagatgtcaacacacaaggcgttcttccaggcatggtctggcaggacagagacgtgcacctgcaggggcctatctgggcaaagattccacacacggacggacattttcacccctctcccctcatgggcggatttggacttaaacaccctcctccacagattctcatcaagaacaccccggtacctgcaaatccttcgaccaccttcagtgcggcaaagtttgcttccttcatcacacagtattccacagggcaggtcagcgtggagatcgagtgggagctgcagaaggagaacagcaaacgctggaaccccgagatccagtacacttccaactacaacaaatctgttaatgtggactttactgtggacactaatggtgtgtattcagagcctcgccccattggcaccagatacctgactcgtaatctgtaa

SEQ ID NO: 4903 - protein, 735 aa, Adeno-associated virus
MAADGYLPDWLKDTLSEGIRQWWKLKPGPPPPKPAERHKDDSGGLVLPGYKYLGPFNGLDKGEPVNEADAAALEYDKAYDRQLDSGDNPYLKYNHADAEFQERLKEDTSFGGNLGRAVFQAKKRVLEPLGLVEEPVKTAPGKKRPVEHSPVEPDSSSGTGKAGQQPARKRLNFGQTGDADSVPDPQPLGQPPAAPSGLGTNTMATGSGAPMADNNEGADGVGNSSGSWHCDSTWMGDRVITTSTRTWALPTYNNHLYKQISSQSGASNDNHYFGYSTPWGYFDFNRFHCHFSPRDWQRLINNNWGFRPKRLNFKLFNIQVKEVTQNDGTTTIANNLTSTVQVFTDSEYQLPYVPGSAHQGCLPPFPADVFMVPQYGYLTLNNGSQAVGRSSFYCLEYFPSQMLRTGNNFTFSYTFEDVPFHSSYAHSQSLDRLMNPLIDQYLYYLSRTNTPSGTTTQSRLQFSQAGASDIRDQSRNWLPGPCYRQQRVSKTAADNNNSEYSWTGATKYHLNGRDSLVNPGPAMASHKDDEEKFFPQSGVLIFGKQGSEKTNVDIEKVMITDEEEIRTTNPVATEQYGSVSTNLQSGNTQAATADVNTQGVLPGMVWQDRDVHLQGPIWAKIPHTDGHFHPSPLMGGFGLKHPPPQILIKNTPVPANPSTTFSAAKFASFITQYSTGQVSVEIEWELQKENSKRWNPEIQYTSNYNKSVNVDFTVDTNGVYSEPRPIGTRYLTRNL

SEQ ID NO: 4904 - DNA, 2208 bp, Adeno-associated virus
atggctgccgatggttatcttccagattggctcgaggacactctctctgaaggaataagacagtggtggaagctcaaacctggcccaccaccaccaaagcccgcagagcggcataaggacgacagcaggggtcttgtgcttcctgggtacaagtacctcggacccttcaacggactcgacaagggggagccggtcaacgaggcagacgccgcggccctcgagcacgacaaggcctacgaccggcagctcgacagcggagacaacccgtacctcaagtacaaccacgccgacgcagagtttcaggagcgccttaaagaagatacgtcttttgggggcaacctcggacgagcagtcttccaggcgaaaaagagggttcttgaacctctgggcctggttgaggaacctgttaagacggctccgggaaaaaagaggccggtagagcactctcctgtggagccagactcctcctcgggaaccggaaaagcgggccagcagcctgcaagaaaaagattaaattttggtcagactggagacgcagactccgtacctgacccccagcctctcggacagccaccagcagccccctctggtctgggatctactacaatggctacaggcagtggcgcaccaatggcagacaataacgagggtgccgatggagtgggtaattcctcaggaaattggcattgcgattcccaatggctgggcgacagagtcatcaccaccagcacccgaacctgggccctgcccacatacaacaaccacctctacaagcaaatctccagccaatcaggagccagcaacgacaaccactactttggctacagcaccccctgggggtattttgacttcaacagattccactgccacttttcaccacgtgactggcaaagactcatcaacaacaactggggattccggcccaaaagactcaacttcaagctctttaatattcaagtcaaagaggtcacgcagaatgacggtacgacgacgattgccaataaccttaccagcacggttcaggtgtttactgactcggagtaccagctcccgtacgtcctgggctcggcgcatcaaggatgcctcccgccgtttccagcggacgtcttcatggtcccacagtatggatacctcaccctgaacaacgggagtcaggcggtaggacgctcttccttttactgcctggagtactttccttctcagatgctgcgtactggaaacaactttcagttcagctacacttttgaagacgtgcctttccacagcagctacgctcacagccagagtctggatcggctgatgaatcctctgatcgaccagtacctgtattatctgaacaagacacaaacaaatagtggaactcttcagcagtctcggctactgtttagccaagctggaccaaccaacatgtctcttcaagctaaaaactggctgcctggaccttgctacagacagcagcgtctgtcaaaacaggcaaacgacaacaacaacagcaactttccctggactgcagctacaaagtatcatctaaatggccgggactcgttggttaatccaggaccagctatggccagtcgcaaggatgacgaagaaaagtttttccccatgcatggaaccctgatatttggtaaacaaggaacaaatgccaacgacgcggatttggaaaatgtcatgattacagatgaagaagaaatcagggccaccaatcccgtggctacggagcagtacgggactgtgtcaaataatttgcaaaactcaaacactggtccaactactggaactgtcaatcaccaaggagcgttacctggtatggtgtggcaggatcgagacgtgtacctgcagggacccatttgggccaagattcctcacaccgatggacactttcatccttctccactgatgggaggttttggactcaaacacccgcctcctcagatcatgatcaaaaacactcccgttccagccaatcctcccacaaacttcagttctgccaagtttgcttctttcatcacacagtattccacgggacaggtcagcgtggagatcgagtgggagctgcagaaggagaacagcaaacgctggaatcccgaaattcagtacacttccaactacaacaagtctgttaatgtggactttactgtggacactaatggtgtgtattcagagcctcgccccattggcaccagatacctgactcgtaatctgtaa

SEQ ID NO: 4905 - protein, 735 aa, Adeno-associated virus
MAADGYLPDWLEDTLSEGIRQWWKLKPGPPPPKPAERHKDDSRGLVLPGYKYLGPFNGLDKGEPVNEADAAALEHDKAYDRQLDSGDNPYLKYNHADAEFQERLKEDTSFGGNLGRAVFQAKKRVLEPLGLVEEPVKTAPGKKRPVEHSPVEPDSSSGTGKAGQQPARKRLNFGQTGDADSVPDPQPLGQPPAAPSGLGSTTMATGSGAPMADNNEGADGVGNSSGNWHCDSQWLGDRVITTSTRTWALPTYNNHLYKQISSQSGASNDNHYFGYSTPWGYFDFNRFHCHFSPRDWQRLINNNWGFRPKRLNFKLFNIQVKEVTQNDGTTTIANNLTSTVQVFTDSEYQLPYVLGSAHQGCLPPFPADVFMVPQYGYLTLNNGSQAVGRSSFYCLEYFPSQMLRTGNNFQFSYTFEDVPFHSSYAHSQSLDRLMNPLIDQYLYYLNKTQTNSGTLQQSRLLFSQAGPTNMSLQAKNWLPGPCYRQQRLSKQANDNNNSNFPWTAATKYHLNGRDSLVNPGPAMASRKDDEEKFFPMHGTLIFGKQGTNANDADLENVMITDEEEIRATNPVATEQYGTVSNNLQNSNTGPTTGTVNHQGALPGMVWQDRDVYLQGPIWAKIPHTDGHFHPSPLMGGFGLKHPPPQIMIKNTPVPANPPTNFSSAKFASFITQYSTGQVSVEIEWELQKENSKRWNPEIQYTSNYNKSVNVDFTVDTNGVYSEPRPIGTRYLTRNL

SEQ ID NO: 4906 - DNA, 2208 bp, Adeno-associated virus
atggctgccgatggttatcttccagattggctcgaggacactctctctgaaggaataagacagtggtggaagctcaaacctggcccaccaccaccaaagcccgcagagcggcataaggacgacagcaggggtcttgtgcttcctgggtacaagtacctcggacccttcaacggactcgacaagggagagccggtcaacgaggcagacgccgcggccctcgagcacgacaaagcctacgaccggcagctcgacagcggagacaacccgtacctcaagtacaaccacgccgacgcggagtttcaggagcgccttaaagaagatacgtcttttgggggcaacctcggacgagcagtcttccaggcgaaaaagagggttcttgaacctctgggcctggttggggaacctgtcaagacggctccaggaaaaaagaggccggtagagcactctcctgtggagccagactcctcctcgggaaccggaaaggcgggccagcagcctgcaagaaaaagattgaattttggtcagactggagacgcagactcagtacctgacccccagcctctcggacagccaccagcagccccctctggtctgggaactaatacgatggctacaggcagtggcgcaccaatggcagacaataacgagggcgccgacggagtgggtaattcctcgggaaattggcattgcgattccacatggatgggcgacagagtcatcaccaccagcacccgaacctgggccctgcccacctacaacaaccacctctacaaacaaatttccagccaatcaggagcctcgaacgacaatcactactttggctacagcaccccttgggggtattttgacttcaacagattccactgccacttttcaccacgtgactggcaaagactcatcaacaacaactggggattccgacccaagagactcaacttcaagctctttaacattcaagtcaaagaggtcacgcagaatgacggtacgacgacgattgccaataaccttaccagcacggttcaggtgtttactgactcggagtaccagctcccgtacgtcctcggctcggcgcatcaaggatgcctcccgccgttcccagcagacgtcttcatggtgccacagtatggatacctcaccctgaacaacgggagtcaggcagtaggacgctcttcattttactgcctggagtactttccttctcagatgctgcgtaccggaaacaactttaccttcagctacacttttgaggacgttcctttccacagcggctacgctcacagccagagtctggaccgtctcatgaatcctctcatcgaccagtacctgtattacttgagcacaacaaacactccaagtggaaccaccacgcagtcaaggcttcagttttctcaggccggagcgagtgacattcgggaccagtctaggaactggcttcctggaccctgttaccgccagcagcgagtatcaaagacatctgcggataacaacaacagtgaatactcgtggactggagctaccaagtaccacctcaatggcagagactctctggtgaatccgggcccggccatggcaagccacaaggacaatgaagaaaagttttttcctcagagcggggttctcatctttgggaagcaaggctcagagaaaacaaatgtggacattgaaaaggtcatgattacagacgaagaggaaatcaggacaaccaatcccgtggctacggagcagtacggttctgtatctaccaacctccagagaggcaacagacaagcagctaccgcagatgtcaacacacaaggcgttcttccaggcatggtctggcaggacagagatgtgtaccttcaggggcccatctgggcaaagattccacacacggacggacattttcacccctctcccctcatgggtggattcggacttaaacaccctcctccacagattctcatcaagaacaccccggtacctgcgaatccttcgaccaccttcagtgcggcaaagtttgcttccttcatcacacagtactccacgggacaggtcagcgtggagatcgagtgggagctgcagaaggaaaacagcaaacgctggaatcccgaaattcagtacacttccaactacaacaagtctgttaatgtggactttactgtggacactaatggcgtgtattcagagcctcgccccattggcaccagatacctgactcgtaatctgtaa

SEQ ID NO: 4907 - protein, 735 aa, Adeno-associated virus
MAADGYLPDWLEDTLSEGIRQWWKLKPGPPPPKPAERHKDDSRGLVLPGYKYLGPFNGLDKGEPVNEADAAALEHDKAYDRQLDSGDNPYLKYNHADAEFQERLKEDTSFGGNLGRAVFQAKKRVLEPLGLVGEPVKTAPGKKRPVEHSPVEPDSSSGTGKAGQQPARKRLNFGQTGDADSVPDPQPLGQPPAAPSGLGTNTMATGSGAPMADNNEGADGVGNSSGNWHCDSTWMGDRVITTSTRTWALPTYNNHLYKQISSQSGASNDNHYFGYSTPWGYFDFNRFHCHFSPRDWQRLINNNWGFRPKRLNFKLFNIQVKEVTQNDGTTTIANNLTSTVQVFTDSEYQLPYVLGSAHQGCLPPFPADVFMVPQYGYLTLNNGSQAVGRSSFYCLEYFPSQMLRTGNNFTFSYTFEDVPFHSGYAHSQSLDRLMNPLIDQYLYYLSTTNTPSGTTTQSRLQFSQAGASDIRDQSRNWLPGPCYRQQRVSKTSADNNNSEYSWTGATKYHLNGRDSLVNPGPAMASHKDNEEKFFPQSGVLIFGKQGSEKTNVDIEKVMITDEEEIRTTNPVATEQYGSVSTNLQRGNRQAATADVNTQGVLPGMVWQDRDVYLQGPIWAKIPHTDGHFHPSPLMGGFGLKHPPPQILIKNTPVPANPSTTFSAAKFASFITQYSTGQVSVEIEWELQKENSKRWNPEIQYTSNYNKSVNVDFTVDTNGVYSEPRPIGTRYLTRNL

SEQ ID NO: 4908 - DNA, 2208 bp, Adeno-associated virus
atggctgccgatggttatcttccagattggctcgaggacactctctctgaaggaataagacagtggtggaagctcaaacctggcccaccaccaccaaagcccgcagagcggcataaggacgacagcaggggtcttgtgcttcctgggtacaagtacctcggacccttcaacggactcgacaagggagagccggtcaacgaggcagacgccgcggccctcgagcacgacaaagcctacgaccggcagctcgacagcggagacaacccgtacctcaagtacaaccacgccgacgcggagtttcaggagcgccttaaagaagatacgtcttttgggggcaacctcggacgagcagtcttccaggcgaaaaagagggttcttgaacctctgggcctggttggggaacctgttaagacggctccgggaaaaaagaggccggtagagcactctcctgtggagccagactcctcctcgggaaccggaaaggcgggccagcagcctgcaagaaaaagattgaattttggtcagactggagacgcagactcagtacctgacccccagcctctcggacagccaccagcagccccctctggtctgggaactaatacgatggctacaggcagtggcgcaccaatggcagacaataacgagggcgccgacggagtgggtaattcctcgggaaatcggcattgcgattccacatggatgggcgacagagtcatcaccaccagcacccgaacctgggccctgcccacctacaacaaccacctctacagacaaatttccagccaatcaggagcctcgaacgacaatcactactttggctacagcaccccttgggggtattttgacttcaacagattccactgccacttttcaccacgtgactggcaaagactcatcaacaacaactggggattccgacccaagagactcaacttcaagctctttaacattcaagtcaaagaggtcacgcagaatgacggtacgacgacgattgccaataaccttaccagcacggttcaggtgtttactgactcggagtaccagctcccgtacgtcctcggctcggcgcatcaaggatgcctcccgccgttcccagcagacgtcttcatggtgccacagtatggatacctcaccctgagcaacgggagtcaggcagtaggacgctcttcattttactgcccggagtactttccttctcagatgctgcgtaccggaaacaactttaccttcagctacacttttgaggacgttcctttccacagcagctacgctcacagccagagtctggaccgtctcatgaatcctctcatcgaccagtacctgtattacttgagcacaacaaacactccaagtggaaccaccacgcagtcaaggcttcagttttctcaggccggagcgagtgacattcgggaccagtctaggaactggcttcctggaccctgttaccgccagcagcgagtatcaaagacatctgcggataacaacaacagtgaatactcgtggactggagctaccaagtaccacctcaatggcagagactctctggtgaatccgggcccggccatggcaagccacaaggacaatgaagaaaagttttttcctcagagcggggttctcatctttgggaagcaaggctcagagaaaacaaatgtggacattgaaaaggtcatgattacagacgaagaggaaatcaggacaaccaatcccgtggctacggagcagtatggttctgtatctaccaacctccagagaggcaacagacaagcagctaccgcagatgtcaacacacaaggcgttcttccaggcatggtctggcaggacagagatgtgtaccttcaggggcccatctgggcaaagattccacacacggacggacattttcacccctctcccctcatgggtggattcggacctaaacaccctcctccacagattctcatcaagaacaccccggtacctgcgaatccttcgaccaccttcagtgcggcaaagtttgcttccttcatcacacagtactccacgggacaggtcagcgtggagatcgagtgggagctgcagaaggaaaacagcaaacgctggaatcccgaaattcagtacacttccaactacaacaagtctgttaatgtggactttactgtggacactaatggcgtgtattcagagcctcgccccattggcaccagatacctgactcgtaatttgtaa

SEQ ID NO: 4909 - protein, 735 aa, Adeno-associated virus
MAADGYLPDWLEDTLSEGIRQWWKLKPGPPPPKPAERHKDDSRGLVLPGYKYLGPFNGLDKGEPVNEADAAALEHDKAYDRQLDSGDNPYLKYNHADAEFQERLKEDTSFGGNLGRAVFQAKKRVLEPLGLVGEPVKTAPGKKRPVEHSPVEPDSSSGTGKAGQQPARKRLNFGQTGDADSVPDPQPLGQPPAAPSGLGTNTMATGSGAPMADNNEGADGVGNSSGNRHCDSTWMGDRVITTSTRTWALPTYNNHLYRQISSQSGASNDNHYFGYSTPWGYFDFNRFHCHFSPRDWQRLINNNWGFRPKRLNFKLFNIQVKEVTQNDGTTTIANNLTSTVQVFTDSEYQLPYVLGSAHQGCLPPFPADVFMVPQYGYLTLSNGSQAVGRSSFYCPEYFPSQMLRTGNNFTFSYTFEDVPFHSSYAHSQSLDRLMNPLIDQYLYYLSTTNTPSGTTTQSRLQFSQAGASDIRDQSRNWLPGPCYRQQRVSKTSADNNNSEYSWTGATKYHLNGRDSLVNPGPAMASHKDNEEKFFPQSGVLIFGKQGSEKTNVDIEKVMITDEEEIRTTNPVATEQYGSVSTNLQRGNRQAATADVNTQGVLPGMVWQDRDVYLQGPIWAKIPHTDGHFHPSPLMGGFGPKHPPPQILIKNTPVPANPSTTFSAAKFASFITQYSTGQVSVEIEWELQKENSKRWNPEIQYTSNYNKSVNVDFTVDTNGVYSEPRPIGTRYLTRNL

SEQ ID NO: 4910 - DNA, 2205 bp, Adeno-associated virus
atggctgccgatggttatcttccagattggctcgaggacactctctctgaaggaataagacagtggtggaagctcaaacctggcccaccaccaccaaagcccgcagagcggcataaggacgacagcaggggtcttgtgcttcctgggtacaagtacctcggacccttcaacggactcgacaagggagagccggtcaacgaggcagacgccgcggccctcgagcacgacaaggcctacgaccggcagctcgacagcggagacaacccgtacctcaagtacaaccacgccgacgcggagtttcaggagcgtcttaaagaagatacgtcttttgggggcaacctcggacgagcagtcttccaggcgaaaaagagggttcttgaacctctgggcctggttgaggaacctgttaagacggctccgggaaaaaagaggccggtagagcactctcctgcggagccagactcctcctcgggaaccggaaaagcgggccagcagcctgcaagaaaaagactgaatttcggtcagactggagacgcagactccgtacctgacccccagcctctcagacagccaccagcagcccccacaagtttgggatctactacaatggctacaggcagtggcgcaccaatggcagacaataacgagggtgccgatggagtgggtaattcctcaggaaattggcattgcgattcccaatggctgggcgacagagtcatcaccaccagcacccgaacctgggccctgcccacctacaacaaccacctttacaagcaaatctccagccaatcaggagcctcaaacgacaaccactactttggctacagcaccccctgggggtattttgacttcaacagattccactgccacttttcaccacgtgactggcaaagactcatcaacaacaactggggattccgacccaagagactcaacttcaagctctttaacattcaagtcaaagaggtcacgcagaatgacggtacgacgacgattgccaataaccttaccagcacggttcaggtgtttactgactcggagtaccagctcccgtacgtcctcggctcggcgcatcaaggatgcctcccgccgtttccagcggacgtcttcatggtcccacagtatggatacctcaccctgaacaacgggagtcaggcggtaggacgctcttccttttactgcctggagtactttccttctcagatgctgcgtactggaaacaactttcagttcagctacacttttgaagacgtgcctttccacagcagctacgctcacagccagagtttggatcggctgatgaatcctctgatcgaccagtacctgtattatctaaacagaacacaaacagctagtggaactcagcagtctcggctactgtttagccaagctggacccacaagcatgtctcttcaagctaaaaactggctgcctggaccgtgttatcgccagcagcgtttgtcaaagcaggcaaacgacaacaacaacagcaactttccctggactggagctaccaagtactacctcaatggcagagactctttggtgaacccgggcccggccatggccagccacaaggacgatgaagaaaagtttttccccatgcatggaaccctaatatttggtaaagaaggaacaaatgctaccaacgcggaattggaaaatgtcatgattacagatgaagaggaaatcaggaccaccaatcccgtggctacagagcagtacggatatgtgtcaaataatttgcaaaactcaaatactgctgcaagtactgaaactgtgaatcaccaaggagcattacctggtatggtgtggcaggatcgagacgtgtacctgcagggacccatttgggccaagattcctcacaccgatggacactttcatccttctccactgatgggaggttttggactcaaacacccgcctcctcagattatgatcaaaaacactcccgttccagccaatcctcccacaaacttcagttctgccaagtttgcttccttcatcacacagtattccacgggacaggtcagcgtggagatcgagtgggagctgcagaaggagaacagcaaacgctggaatcccgaaattcagtacacttccaactacaacaaatctgttaatgtggactttactgtggacactaatggtgtgtattcagagcctcgccccattggcaccagatacctgactcgtaatctgtaa

SEQ ID NO: 4911 - protein, 734 aa, Adeno-associated virus
MAADGYLPDWLEDTLSEGIRQWWKLKPGPPPPKPAERHKDDSRGLVLPGYKYLGPFNGLDKGEPVNEADAAALEHDKAYDRQLDSGDNPYLKYNHADAEFQERLKEDTSFGGNLGRAVFQAKKRVLEPLGLVEEPVKTAPGKKRPVEHSPAEPDSSSGTGKAGQQPARKRLNFGQTGDADSVPDPQPLRQPPAAPTSLGSTTMATGSGAPMADNNEGADGVGNSSGNWHCDSQWLGDRVITTSTRTWALPTYNNHLYKQISSQSGASNDNHYFGYSTPWGYFDFNRFHCHFSPRDWQRLINNNWGFRPKRLNFKLFNIQVKEVTQNDGTTTIANNLTSTVQVFTDSEYQLPYVLGSAHQGCLPPFPADVFMVPQYGYLTLNNGSQAVGRSSFYCLEYFPSQMLRTGNNFQFSYTFEDVPFHSSYAHSQSLDRLMNPLIDQYLYYLNRTQTASGTQQSRLLFSQAGPTSMSLQAKNWLPGPCYRQQRLSKQANDNNNSNFPWTGATKYYLNGRDSLVNPGPAMASHKDDEEKFFPMHGTLIFGKEGTNATNAELENVMITDEEEIRTTNPVATEQYGYVSNNLQNSNTAASTETVNHQGALPGMVWQDRDVYLQGPIWAKIPHTDGHFHPSPLMGGFGLKHPPPQIMIKNTPVPANPPTNFSSAKFASFITQYSTGQVSVEIEWELQKENSKRWNPEIQYTSNYNKSVNVDFTVDTNGVYSEPRPIGTRYLTRNL

SEQ ID NO: 4912 - DNA, 3160 bp, Adeno-associated virus
acccttcactaaagggactagtcctgcaggtttaaacgaattcgcccttgctgcgtcaactggaccaatgagaactttcccttcaacgactgtgtcgacaagatggtgatttggtgggaggaggggaagatgaccgccaaggtcgtggagtcggccaaagccattctcggaggaagcaaggtgcgcgtggaccagaaatgcaagtcctcggcccagatagatccgactcccgtgatcgtcacctccaacaccaacatgtgcgccgtgattgacgggaactcaacgaccttcgaacaccagcagccgttgcaagaccggatgttcaaatttgaactcacccgccgtctggatcatgactttgggaaggtcaccaagcgggaagtcaaagactttttccggtgggcaaaggatcacgtggttgaggtggagcatgaattctacgtcaaaaagggtggagccaagaaaagacccgcccctagtgacgcagatataagtgagcccaaacgggtgcgcgagtcagttgcgcagccatcgacgtcagacgcggaagcttcgatcaactacgcggacaggtaccaaaacaaatgttctcgtcacgtgggcatgaatctgatgctgtttccctgcagacaatgcgagagaatgaatcaaaattcaaatatctgcttcactcacggacagaaagactgtttagagtgctttcccgtgtcagaatctcaacctgtttctgtcgtcaaaaaggcgtatcagaaactgtgctacattcatcatatcatgggaaaggtgccagacgcttgcactgcctgcgatctggtcaatgtggatttggatgactgcatctctgaacaataaatgatttaaatcaggtatggctgccgatggttatcttccagattggctcgaggacactctctctgaaggaataagacagtggtggaagctcaaacctggcccaccaccaccaaagcccgcagagcggcataaggacgacagcaggggtcttgtgcttcctgggtacaagtacctcggacccttcaacggactcgacaagggagagccggtcaacgaggcagacgccgcggccctcgagcacgacaaggcctacgaccggcagctcgacagcggagacaacccgtacctcaagtacaaccacgccgacgcggagtttcaggagcgtcttaaagaagatacgtcttttgggggcaacctcggacgagcagtcttccaggcgaaaaagagggttcttgaacctctgggcctggttgaggaacctgttaagacggctccgggaaaaaagaggccggtagagcactctcctgcggagccagactcctcctcgggaaccggaaaagcgggccagcagcctgcaagaaaaagactgaatttcggtcagactggagacgcagactccgtacctgacccccagcctctcagacagccaccagcagcccccacaagtttgggatctactacaatggctacaggcagtggcgcaccaatggcagacaataacgagggtgccgatggagtgggtaattcctcaggaaattggcattgcgattcccaatggctgggcgacagagtcatcaccaccagcacccgaacctgggccctgcccacctacaacaaccacctttacaagcaaatctccagccaatcaggagcctcaaacgacaaccactactttggctacagcaccccctgggggtattttgacttcaacagattccactgccacttttcaccacgtgactggcaaagactcatcaacaacaactggggattccgacccaagagactcaacttcaagctctttaacattcaagtcaaagaggtcacgcagaatgacggtacgacgacgattgccaataaccttaccagcacggttcaggtgtttactgactcggagtaccagctcccgtacgtcctcggctcggcgcatcaaggatgcctcccgccgtttccagcggacgtcttcatggtcccacagtatggatacctcaccctgaacaacgggagtcaggcggtaggacgctcttccttttactgcctggagtactttccttctcagatgctgcgtactggaaacaactttcagttcagctacacttttgaagacgtgcctttccacagcagctacgctcacagccagagtttggatcggctgatgaatcctctgatcgaccagtacctgtattatctaaacagaacacaaacagctagtggaactcagcagtctcggctactgtttagccaagctggacccacaagcatgtctcttcaagctaaaaactggctgcctggaccgtgttatcgccagcagcgtttgtcaaagcaggcaaacgacaacaacaacagcaactttccctggactggagctaccaagtactacctcaatggcagagactctttggtgaacccgggcccggccatggccagccacaaggacgatgaagaaaagtttttccccatgcatggaaccctaatatttggtaaagaaggaacaaatgctaccaacgcggaattggaaaatgtcatgattacagatgaagaggaaatcaggaccaccaatcccgtggctacagagcagtacggatatgtgtcaaataatttgcaaaactcaaatactgctgcaagtactgaaactgtgaatcaccaaggagcattacctggtatggtgtggcaggatcgagacgtgtacctgcagggacccatttgggccaagattcctcacaccgatggacactttcatccttctccactgatgggaggttttggactcaaacacccgcctcctcagattatgatcaaaaacactcccgttccagccaatcctcccacaaacttcagttctgccaagtttgcttccttcatcacacagtattccacgggacaggtcagcgtggagatcgagtgggagctgcagaaggagaacagcaaacgctggaatcccgaaattcagtacacttccaactacaacaaatctgttaatgtggactttactgtggacactaatggtgtgtattcagagcctcgccccattggcaccagatacctgactcgtaatctgtaattgcttgttaatcaataaaccgtttaattcgtttcagttgaactttggtctctgcgaagggcgaattcgcggccgctaaatcaatcg

SEQ ID NO: 4913 - protein, 734 aa, Adeno-associated virus
MAADGYLPDWLEDTLSEGIRQWWKLKPGPPPPKPAERHKDDSRGLVLPGYKYLGPFNGLDKGEPVNEADAAALEHDKAYDRQLDSGDNPYLKYNHADAEFQERLKEDTSFGGNLGRAVFQAKKRVLEPLGLVEEPVKTAPGKKRPVEHSPAEPDSSSGTGKAGQQPARKRLNFGQTGDADSVPDPQPLGQPPAAPTSLGSTTMATGSGAPMADNNEGADGVGNSSGNWHCDSQWLGDRVITTSTRTWALPTYNNHLYKQISSQSGASNDNHYFGYSTPWGYFDFNRFHCRFSPRDWQRLINNNWGFRPKRLNFKLFNIQVKEVTQNDGTTTIANNLTSTVQVFTDSEYQLPYVLGSAHQGCLPPFPADVFMVPQYGYLTLNNGSQAVGRSSFYCLEYFPSQMLRTGNNFQFSYTFEDVPFHSSYAHSQGLDRLMNPLIDQYLYYLNRTQTASGTQQSRLLFSQAGPTSMSLQAKNWLPGPCYRQQRLSKQANDNNNSNFPWTGATKYHLNGGDSLVNPGPAMASHKDDEEKFFPMHGTLIFGKEGTNATNAELENVMITDEEEIRTTNPVATEQYGYVSNNLQNSNTAASTETVNHQGALPGMVWQDRDVYLRGPIWAKIPHADGHFHPSPLMGGFGLKHPPPQIMIKNTPVPANPPTNFSSAKFASFITQYSTGQVSVEIEWELQKENSKRWNPEIQYTSNYNKSVNVDFTVDTNGVYSEPRPIGTRYLTRNL

SEQ ID NO: 4914 - DNA, 3157 bp, Adeno-associated virus
ctcactaagggactagtcctgcaggtttaaacgaattcgcccttgctgcgtcaactggaccaatgagaactttcccttcaacgactgtgtcgacaagatggtgatttggtgggaggaggggaagatgaccgccaaggtcgtggagtcggccaaagccactctcggaggaagcaaggtgcgcgtggaccagaaacgcaagtcctcggcccagatagatccgactcccgtgatcgtcacctccaacaccaacatgtgcgccgtgattgacgggaactcaacgaccttcgaacaccagcagccgttgcaagaccgaatgttcaaatttgaactcacccgccgtctggatcatgacttcgggaaggtcaccaagcaggaagtcaaagactttttccggtgggcaaaggatcacgtggttgaggtggagcatgaattctacgtcaaaaagggtggagccaagaaaagacccgcccctagtgacgcagatataagtgagcccaaacgggtgcgcgagtcagttgcgcagccatcgacgtcagacgcggaagcttcgatcaactacgcggacaggtaccaaaacaaatgttctcgtcacgtgggcatgaatctgatgctgtttccctgcagacaatgcgagagaatgaatcaaaattcaaatatctgcttcactcacggacagaaagactgtttagagtgctttcccgtgtcagaatctcaacctgtttctgtcgtcaaaaaggcgtatcagaaactgtgctacattcatcatatcatgggaaaggtgccagacgcttgcactgcctgcgatctggtcaatgtggatttggatgactgcatctctgaacaataaatgatttaaatcaggtatggctgccgatggttatcttccagattggctcgaggacactctctctgaaggaataagacagtggtggaagctcaaacctggcccaccaccaccaaagcccgcagagcggcataaggacgacagcaggggtcttgtgcttcctgggtacaagtacctcggacccttcaacggactcgacaagggagagccggtcaacgaggcagacgccgcggctctcgagcacgacaaggcctacgaccggcagctcgacagcggagacaacccgtacctcaagtacaaccacgccgacgcggagtttcaggagcgtcttaaagaagatacgtcttttgggggcaacctcggacgagcagtcttccaggcgaaaaagagggttcttgaacctctgggcctggttgaggaacctgttaagacggctccgggaaaaaagaggccggtagagcactctcctgcggagccagactcctcctcgggaaccggaaaagcgggccagcagcctgcaagaaaaagactgaatttcggtcagactggagacgcagactccgtacctgacccccagcctctcggacagccaccagcagcccccacaagtttgggatctactacaatggctacaggcagtggcgcaccaatggcagacaataacgagggtgccgatggagtgggtaattcctcaggaaattggcattgcgattcccaatggctgggcgacagagtcatcaccaccagcacccgaacctgggccctgcccacctacaacaaccacctttacaagcaaatctccagccaatcaggagcctcaaacgacaaccactactttggctacagcaccccctgggggtattttgacttcaacagattccactgccgcttttcaccacgtgactggcaaagactcatcaacaacaactggggattccgacccaagagactcaacttcaagctctttaacattcaagtcaaagaggtcacgcagaatgacggtacgacgacgattgccaataaccttaccagcacggttcaggtgtttactgactcggagtaccagctcccgtacgtcctcggctcggcgcatcaaggatgcctcccgccgtttccagcggacgtcttcatggtcccacagtatggatacctcaccctgaacaacgggagtcaggcggtaggacgctcttccttttactgcctggagtactttccttctcagatgctgcgtactggaaacaactttcagttcagctacacttttgaagacgtgcctttccacagcagctacgctcacagccagggtttggatcggctgatgaatcctctgatcgaccagtacctgtattatctaaacagaacacaaacagctagtggaactcagcagtctcggctactgtttagccaagctggacccacaagcatgtctcttcaagctaaaaactggctgcctggaccgtgttatcgccagcagcgtttgtcaaagcaggcaaacgacaacaacaacagcaactttccctggactggagctaccaagtaccacctcaatggcggagactctttggtgaacccgggcccggccatggccagccacaaggacgatgaagaaaagtttttccccatgcatggaaccctaatatttggtaaagaaggaacaaatgctaccaacgcggaattggaaaatgtcatgattacagatgaagaggaaatcaggaccaccaatcccgtggctacagagcagtacggatatgtgtcaaataatttgcaaaactcaaatactgctgcaagtactgaaactgtgaatcaccaaggagcattacctggtatggtgtggcaggatcgagacgtgtacctgcggggacccatttgggccaagattcctcacgccgatggacactttcatccttctccactgatgggaggttttggactcaaacacccgcctcctcagattatgatcaaaaacactcccgttccagccaatcctcccacaaacttcagttctgccaagtttgcttccttcatcacacagtattccacgggacaggtcagcgtggagatcgagtgggagctgcagaaggagaacagcaaacgctggaatcccgaaattcagtacacttccaactacaacaaatctgttaatgtggactttactgtggacactaatggtgtgtattcagagcctcgccccattggcaccagatacctgactcgtaatctgtaattgcttgttaatcaataaaccgtttaattcgtttcagttgaactttggtctctgcgaagggcgaattcgcggccgctaaattcaattcg

SEQ ID NO: 4915 - protein, 734 aa, Adeno-associated virus
MAADGYLPDWLEDTLSEGIRQWWKLKPGPPPPKPAERHKDDSRGLVLPGYKYLGPFNGLDKGEPVNEADAAALEHDKAYDRQLDSGDNPYLKYNHADAEFQERLKEDTSFGGNLGRAVFQAKKRVLEPLGLVEEPVKTAPGKKRPVEHSPAEPDSSSGTGKAGQQPARKRLNFGQTGDADSVPDPQPLGQPPAAPTSLGSTTMATGSGAPMADNNEGADGVGNSSGNWHCDSQWLGDRVITTSTRTWALPTYNNHLYKQISSQSGASNDNHYFGYSTPWGYFDFNRFHCHFSPRDWQRLINNNWGFRPKRLNFKLFNIQVKEVTQNDGTTTIANNLTSTVQVFTDSEYQLPYVLGSAHQGCLPPFPADVFMVPQYGYLTLNNGSQAVGRSSFYCLECFPSQMLRTGNNFQFSYTFEDVPFHSSYAHSQSLDRLMNPLIDQYLYYLNRTQTASGTQQSRLLFSQAGPTSMSLQAKNWLPGPCYRQQRLSKQANDNNNSNFPWTGATKYHLNGRDSLVNPGPAMASHKDDEEKFFPMHGTLIFGKEGTNATNAELENVMITDEEEIRTTNPVATEQYGYVSNNLQNSNTAASTETVNHQGALPGMVWQDRDVYLQGPIWAKIPHTDGHFHPSPLMGGFGLKHPPPQIMIKNTPVPANPPTNFSSAKFASFITQYSTGQVSVEIEWELQKENSKRWNPEIQYTSNYNKSVNVDFTVDTNGVYSEPRPIGTRYLTRNL

SEQ ID NO: 4916 - DNA, 2208 bp, Adeno-associated virus
atggctgccgatggttatcttccagattggctcgaggacactctctctgaaggaataagacagtggtggaagctcaaacctggcccaccaccaccaaagcccgcagagcggcataaggacgacagcaggggtcttgtgcttcctggatacaagtacctcggacccttcaacggactcgacaagggagagccggtcaacgaggcagacgccgcggccctcgagcacgacaaggcctacgaccggcagctcgacagcggagacaacccgtacctcaagtacaaccacgccgacgcggagtttcaggagcgccttaaagaagatacgtcttttgggggcaacctcggacgagcagtcttccaggcgaaaaagagggttcttgaacctctgggcctggttgaggaacctgttaagacggctccgggaaaaaagaggccggtagagcactctcctgtggagccagactcctcctcgggaaccggaaaagcgggcaaccagcctgcaagaaaaagattgaatttcggtcagactggagacgcagactccgtacctgacccccagcctctcggacagccaccagcatccccctctggtctgggaactaatacgatggctacaggcagtggcgcaccaatggcagacaataacgagggcgccgacggagtgggtaattcctcgggaaattggcattgcgattccacatggatgggcgacagagtcgtcaccaccagcacccgcacctgggccctgcccacctacaacaaccacctctacaagcagatttccagccaatcaggagccagcaacgacaaccactactttggctacagcaccccttgggggtattttgacttcaacagattccactgccacttttcgccacgcgactggcagagactcatcaacaacaactggggattccggcccaaaagactcaacttcaagctgtttaacattcaagtcaaggaggtcacgcagaatgacggtacgacgacgattgccaataaccttaccagcacggttcaggtgtttactgacttggagtaccagctcccgtacgtcctcggctcggcgcatcaaggatgcctcccgccgttcccagcagacgtcttcatggtgccacagtatggatacctcaccctgaacaacgggagtcaggcggtaggacgctcttccttttactgcctggagtactttccttctcagatgcttcgcaccggaaacaactttaccttcagctacacttttgaagacgttcctttccacagcagctacgctcacagtcaaagtctggaccgtctcatgaatcctctcatcgaccagtacctgtattacttgagcagaacaaacactccaagcggaaccactacgcagtccaggcttcagttttctcaggccggagcgagtgacattcgggaccagtctaggaactggcttcctggaccctgttaccgccagcagcgagtatcaaagacagctgcggataacaacaacagtgaatactcgtggactggagctaccaagtaccacctcaatggcagagactctctggtgaatccgggcccggccatggccagccacaaggacgatgaagaaaagttttttcctcaaagcggggttctcatctttgggaagcaaggctcagagaaaacaaatgtggacattgaaaaggtcatgattacagacgaagaggaaatcaggaccaccaatcccgtggctacggagcagtatggttctgtatctaccaacctccagagcggcaacacacaagcagctacctcagatgtcaacacacaaggcgttcttccaggcatggtctggcaggacagagacgtgtacctgcaggggcccatctgggcaaaaattccacacacggacggacattttcacccctctcccctcatgggcggatttggacttaaacaccctcctccacagattctcattaagaataccccggtacctgcgaatccttcgaccaccttcagcgcggcaaagtttgcttccttcatcacacagtattccacggggcaggtcagcgtggagatcgagtgggagctgcagaaggagaacagcaaacgctggaatcccgaaattcagtacacttccaactacaacaaatctgttaatgtggactttactgtggacactaatggggtgtattcagagcctcgccctattggcaccagatacctgactcgtaatctgtaa

SEQ ID NO: 4917 - DNA, 3159 bp, Adeno-associated virus
gattgatttagcggccgcgaattcgcccttgctgcgtcaactggaccaatgagaactttcccttcaacgattgcgtcgacaagatggtgatctggtgggaggagggaaagatgaccgccaaggtcgtggagtcggccaaagccattctcggaggaagcaaggtgcgtgtggaccaaaagtgcaagtcttcggcccagatcgacccgactcccgtgatcgtcacctccaacaccaacatgtgcgccgtgattgatggaaactcaacgaccttcgagcaccagcagccgttgcaagaccggatgttcaaatttgaacttacccgccgtctggatcatgactttggaaaggtcaccaagcaggaagtgaaagactttttccggtgggcaaaggatcacgtggttgaggtggagcatgagttctacgtcaaaaagggtggagccaaaaaaagacccgcccccagtgacgcagatataagtgagcccaaacgggcgcgcgagtcagttgcgcagccatcgacgtcagacgcggaagcttcgatcaactacgcggacaggtaccaaaacaaatgttctcgtcacgtgggcatgaatctgatgctgtttccctgcagacaatgcgagagaatgaatcagaattcaaatatctgcttcactcacggacagaaagactgtccatagtgctttcccgtgtcagaatctcaacccgtttctgtcgtcaaaaaggcgtatcagaaactgtgctacattcatcacatcatgggaaaggtgccagacgcttgcactgcttgcgacctggtcaatgtggatttggatgactgcatctctgaacaataaatgatttaaatcaggtatggctgccgatggttatcttccagattggctcgaggacactctctctgaaggaataagacagtggtggaagctcaaacctggcccaccaccaccaaagcccgcagagcggcataaggacgacagcaggggtcttgtgcttcctggatacaagtacctcggacccttcaacggactcgacaagggagagccggtcaacgaggcagacgccgcggccctcgagcacgacaaggcctacgaccggcagctcgacagcggagacaacccgtacctcaagtacaaccacgccgacgcggagtttcaggagcgccttaaagaagatacgtcttttgggggcaacctcggacgagcagtcttccaggcgaaaaagagggttcttgaacctctgggcctggttgaggaacctgttaagacggctccgggaaaaaagaggccggtagagcactctcctgtggagccagactcctcctcgggaaccggaaaagcgggcaaccagcctgcaagaaaaagattgaatttcggtcagactggagacgcagactccgtacctgacccccagcctctcggacagccaccagcatccccctctggtctgggaactaatacgatggctacaggcagtggcgcaccaatggcagacaataacgagggcgccgacggagtgggtaattcctcgggaaattggcattgcgattccacatggatgggcgacagagtcgtcaccaccagcacccgcacctgggccctgcccacctacaacaaccacctctacaagcagatttccagccaatcaggagccagcaacgacaaccactactttggctacagcaccccttgggggtattttgacttcaacagattccactgccacttttcgccacgcgactggcagagactcatcaacaacaactggggattccggcccaaaagactcaacttcaagctgtttaacattcaagtcaaggaggtcacgcagaatgacggtacgacgacgattgccaataaccttaccagcacggttcaggtgtttactgacttggagtaccagctcccgtacgtcctcggctcggcgcatcaaggatgcctcccgccgttcccagcagacgtcttcatggtgccacagtatggatacctcaccctgaacaacgggagtcaggcggtaggacgctcttccttttactgcctggagtactttccttctcagatgcttcgcaccggaaacaactttaccttcagctacacttttgaagacgttcctttccacagcagctacgctcacagtcaaagtctggaccgtctcatgaatcctctcatcgaccagtacctgtattacttgagcagaacaaacactccaagcggaaccactacgcagtccaggcttcagttttctcaggccggagcgagtgacattcgggaccagtctaggaactggcttcctggaccctgttaccgccagcagcgagtatcaaagacagctgcggataacaacaacagtgaatactcgtggactggagctaccaagtaccacctcaatggcagagactctctggtgaatccgggcccggccatggccagccacaaggacgatgaagaaaagttttttcctcaaagcggggttctcatctttgggaagcaaggctcagagaaaacaaatgtggacattgaaaaggtcatgattacagacgaagaggaaatcaggaccaccaatcccgtggctacggagcagtatggttctgtatctaccaacctccagagcggcaacacacaagcagctacctcagatgtcaacacacaaggcgttcttccaggcatggtctggcaggacagagacgtgtacctgcaggggcccatctgggcaaaaattccacacacggacggacattttcacccctctcccctcatgggcggatttggacttaaacaccctcctccacagattctcattaagaataccccggtacctgcgaatccttcgaccaccttcagcgcggcaaagtttgcttccttcatcacacagtattccacggggcaggtcagcgtggagatcgagtgggagctgcagaaggagaacagcaaacgctggaatcccgaaattcagtacacttccaactacaacaaatctgttaatgtggactttactgtggacactaatggggtgtattcagagcctcgccctattggcaccagatacctgactcgtaatctgtaattgcttgttaatcaataaaccgtttaattcgtttcagttgaactttggtctctgcgaagggcgaattcgtttaaacctgcaggactagtccctttagtgagg

SEQ ID NO: 4918 - protein, 735 aa, Adeno-associated virus
MAADGYLPDWLEDTLSEGIRQWWKLKPGPPPPKPAERHKDDSRGLVLPGYKYLGPFNGLDKGEPVNEADAAALEHDKAYDRQLDSGDNPYLKYNHADAEFQERLKEDTSFGGNLGRAVFQAKKRVLEPLGLVEEPVKTAPGKKRPVEHSPVEPDSSSGTGKAGNQPARKRLNFGQTGDADSVPDPQPLGQPPASPSGLGTNTMATGSGAPMADNNEGADGVGNSSGNWHCDSTWMGDRVVTTSTRTWALPTYNNHLYKQISSQSGASNDNHYFGYSTPWGYFDFNRFHCHFSPRDWQRLINNNWGFRPKRLNFKLFNIQVKEVTQNDGTTTIANNLTSTVQVFTDLEYQLPYVLGSAHQGCLPPFPADVFMVPQYGYLTLNNGSQAVGRSSFYCLEYFPSQMLRTGNNFTFSYTFEDVPFHSSYAHSQSLDRLMNPLIDQYLYYLSRTNTPSGTTTQSRLQFSQAGASDIRDQSRNWLPGPCYRQQRVSKTAADNNNSEYSWTGATKYHLNGRDSLVNPGPAMASHKDDEEKFFPQSGVLIFGKQGSEKTNVDIEKVMITDEEEIRTTNPVATEQYGSVSTNLQSGNTQAATSDVNTQGVLPGMVWQDRDVYLQGPIWAKIPHTDGHFHPSPLMGGFGLKHPPPQILIKNTPVPANPSTTFSAAKFASFITQYSTGQVSVEIEWELQKENSKRWNPEIQYTSNYNKSVNVDFTVDTNGVYSEPRPIGTRYLTRNL

SEQ ID NO: 4919 - DNA, 2205 bp, Adeno-associated virus
atggctgccgatggttatcttccagattggctcgaggacactctctctgaaggaataagacagtggtggaagctcaaacctggcccaccaccaaagcccgcagagcggcataaggacgacagcaggggtcttgtgcttcctggatacaagtacctcggacccttcaacggactcgacaagggagagccggtcaacgaggcagacgccgcggccctcgagcacgacaaggcctacgaccggcagctcgacagcggagacaacccgtacctcaagtacaaccacgccgacgcggagtttcaggagcgccttaaagaagatacgtcttttgggggcaacctcggacgagcagtcttccaggcgaaaaagagggttcttgaacctctgggcctggttgaggaacctgttaagacggctccgggaaaaaagaggcccgtagagcactctcctgtggagccagactcctcctcgggaaccggaaaagcgggcaaccagcctgcaagaaaaagattgaatttcggtcagactggagacgcagactccgtacctgacccccagcctctcggacagccaccagcagccccctctggtctgggaactaatacgatggctacaggcagtggcgcaccaatggcagacaataacgagggcgccgacggagtgggtaattcctcgggagattggcattgcgattccacatggatgggcgacagagtcatcaccaccagcacccgcacctgggccctgcccacctacaacaaccacctctacaagcagatttccagccaatcaggagccagcaatgacaaccactactttggctacagcaccccttgggggtattttgacttcaacagattccactgccacttttcgccacgcgactggcagagactcatcaacaacaactggggattccggcccaaaagactcaacctcaagctgtttaacattcaagtcaaggaggtcacgcagaatgacggtacgacgacgattgccaataaccttaccagcacggttcaggtgtttactgacttggagtaccagctcccgtacgtcctcggctcggcgcatcaaggatgcctcccgccgttcccagcagacgtcttcatggtgccacagtatggatacctcaccctgaacaacgggagtcaggcggtaggacgctcttccttttactgcctggagtactttccttctcagatgcttcgtaccggaaacaactttaccttcagctacacttttgaagacgttcctttccacagcagctacgctcacagtcaaagtctggaccgtctcatgaatcctctcatcgaccagtacctgtattacttgagcagaacaaacactccaagcggaaccactacgcagtccaggcttcagttttctcaggccggagcgagtgacattcgggaccagtctaggaactggcttcctggaccctgttaccgccagcagcgagtatcaaagacagctgcggataacaacaacggtgaatactcgtggactggagctaccaagtaccacctcaatggcagagactctctggtgaatccgggcccggccatggccagccacaaggacgatgaagaaaagttttttcctcaaagcggggttctcatctttgggaagcaaggctcagagaaaacaaatgtggacattgaaaaggtcatgattacagacgaagaggaaatcaggaccaccaatcccgtggctacggagcagtatggttctgtatctaccaacctccagagcggcaacacacgagcagctacctcagatgtcaacacacaaggcgttcttccaggcatggtctggcaggacagagacgtgtacctgcaggggcccatctgggcaaaaattccacacacggacggacattttcacccctctcccctcatgggcggatttggacttaaacaccctcctccacagattctcattaagaataccccggtacctgcgaatccttcgaccaccttcagcgcggcaaagtttgcttccttcatcacacagtattccacggggcaggtcagcgtggagatcgagtgggagctgcagaaggagaacagcaaacgctggaatcccgaaattcagtacacttccaactacaacaaatctgttaatgtggactttactgtggacactaatggggtgtattcagagcctcgccctattggcaccagatacctgactcgtaatctgtaa

SEQ ID NO: 4920 - DNA, 3156 bp, Adeno-associated virus
cgattgaatttagcggccgcgaattcgcccttgctgcgtcaacggaccaatgagaactttcccttcaacgattgcgtcgacaagatggtgatctggtgggaggagggaaagatgaccgccaaggtcgtggagtcggccaaagccattctcggaggaagcaaggtgcgtgtggaccaaaagtgcaagtcttcggcccagatcgacccgactcccgtgatcgtcacctccaacaccaacatgtgcgccgtgattgatggaaactcaacgaccttcgagcaccagcagccgttgcaagaccggatgttcaaatttgaacttacccgccgtctggatcatgactttggaaaggtcaccaagcaggaagtgaaagactttttccggtgggcaaaggatcacgtggttgaggtggagcatgagttctacgtcaaaaagggtggagccaaaaaaagacccgcccccagtgacgcagatataagtgagcccaaacgggcgcgcgagtcagttgcgcagccatcgacgtcagacgcggaagcttcgatcaactacgcggacaggtaccaaaacaaatgttctcgtcacgtgggcatgaatctgatgctgtttccctgcagacaatgcgagcgaatgaatcagaattcaaatatctgcttcactcacggacagaaagactgtttagagtgctttcccgtgtcagaatctcaacccgtttctgtcgtcaaaaaggcgtatcagaaactgtgctacattcatcacatcatgggaaaggtgccagacgcttgcactgcttgcgacctggtcaatgtggatttggatgactgcatctctgaacaataaatgatttaaatcaggtatggctgccgatggttatcttccagattggctcgaggacactctctctgaaggaataagacagtggtggaagctcaaacctggcccaccaccaaagcccgcagagcggcataaggacgacagcaggggtcttgtgcttcctggatacaagtacctcggacccttcaacggactcgacaagggagagccggtcaacgaggcagacgccgcggccctcgagcacgacaaggcctacgaccggcagctcgacagcggagacaacccgtacctcaagtacaaccacgccgacgcggagtttcaggagcgccttaaagaagatacgtcttttgggggcaacctcggacgagcagtcttccaggcgaaaaagagggttcttgaacctctgggcctggttgaggaacctgttaagacggctccgggaaaaaagaggcccgtagagcactctcctgtggagccagactcctcctcgggaaccggaaaagcgggcaaccagcctgcaagaaaaagattgaatttcggtcagactggagacgcagactccgtacctgacccccagcctctcggacagccaccagcagccccctctggtctgggaactaatacgatggctacaggcagtggcgcaccaatggcagacaataacgagggcgccgacggagtgggtaattcctcgggagattggcattgcgattccacatggatgggcgacagagtcatcaccaccagcacccgcacctgggccctgcccacctacaacaaccacctctacaagcagatttccagccaatcaggagccagcaatgacaaccactactttggctacagcaccccttgggggtattttgacttcaacagattccactgccacttttcgccacgcgactggcagagactcatcaacaacaactggggattccggcccaaaagactcaacctcaagctgtttaacattcaagtcaaggaggtcacgcagaatgacggtacgacgacgattgccaataaccttaccagcacggttcaggtgtttactgacttggagtaccagctcccgtacgtcctcggctcggcgcatcaaggatgcctcccgccgttcccagcagacgtcttcatggtgccacagtatggatacctcaccctgaacaacgggagtcaggcggtaggacgctcttccttttactgcctggagtactttccttctcagatgcttcgtaccggaaacaactttaccttcagctacacttttgaagacgttcctttccacagcagctacgctcacagtcaaagtctggaccgtctcatgaatcctctcatcgaccagtacctgtattacttgagcagaacaaacactccaagcggaaccactacgcagtccaggcttcagttttctcaggccggagcgagtgacattcgggaccagtctaggaactggcttcctggaccctgttaccgccagcagcgagtatcaaagacagctgcggataacaacaacggtgaatactcgtggactggagctaccaagtaccacctcaatggcagagactctctggtgaatccgggcccggccatggccagccacaaggacgatgaagaaaagttttttcctcaaagcggggttctcatctttgggaagcaaggctcagagaaaacaaatgtggacattgaaaaggtcatgattacagacgaagaggaaatcaggaccaccaatcccgtggctacggagcagtatggttctgtatctaccaacctccagagcggcaacacacgagcagctacctcagatgtcaacacacaaggcgttcttccaggcatggtctggcaggacagagacgtgtacctgcaggggcccatctgggcaaaaattccacacacggacggacattttcacccctctcccctcatgggcggatttggacttaaacaccctcctccacagattctcattaagaataccccggtacctgcgaatccttcgaccaccttcagcgcggcaaagtttgcttccttcatcacacagtattccacggggcaggtcagcgtggagatcgagtgggagctgcagaaggagaacagcaaacgctggaatcccgaaattcagtacacttccaactacaacaaatctgttaatgtggactttactgtggacactaatggggtgtattcagagcctcgccctattggcaccagatacctgactcgtaatctgtaattgcttgttaatcaataaaccgtttaattcgtttcagttgaactttggtctctgcgaagggcgaattcgtttaaacctgcaggactagtccctttagtgag

SEQ ID NO: 4921 - protein, 734 aa, Adeno-associated virus
MAADGYLPDWLEDTLSEGIRQWWKLKPGPPPKPAERHKDDSRGLVLPGYKYLGPFNGLDKGEPVNEADAAALEHDKAYDRQLDSGDNPYLKYNHADAEFQERLKEDTSFGGNLGRAVFQAKKRVLEPLGLVEEPVKTAPGKKRPVEHSPVEPDSSSGTGKAGNQPARKRLNFGQTGDADSVPDPQPLGQPPAAPSGLGTNTMATGSGAPMADNNEGADGVGNSSGDWHCDSTWMGDRVITTSTRTWALPTYNNHLYKQISSQSGASNDNHYFGYSTPWGYFDFNRFHCHFSPRDWQRLINNNWGFRPKRLNLKLFNIQVKEVTQNDGTTTIANNLTSTVQVFTDLEYQLPYVLGSAHQGCLPPFPADVFMVPQYGYLTLNNGSQAVGRSSFYCLEYFPSQMLRTGNNFTFSYTFEDVPFHSSYAHSQSLDRLMNPLIDQYLYYLSRTNTPSGTTTQSRLQFSQAGASDIRDQSRNWLPGPCYRQQRVSKTAADNNNGEYSWTGATKYHLNGRDSLVNPGPAMASHKDDEEKFFPQSGVLIFGKQGSEKTNVDIEKVMITDEEEIRTTNPVATEQYGSVSTNLQSGNTRAATSDVNTQGVLPGMVWQDRDVYLQGPIWAKIPHTDGHFHPSPLMGGFGLKHPPPQILIKNTPVPANPSTTFSAAKFASFITQYSTGQVSVEIEWELQKENSKRWNPEIQYTSNYNKSVNVDFTVDTNGVYSEPRPIGTRYLTRNL

SEQ ID NO: 4922 - DNA, 2208 bp, Adeno-associated virus
atggctgccgatggttatcttccagattggctcgaggacactctctctgaaggaataagacagtggtggaagctcaaacctggcccaccaccaccaaagcccgcagagcggcataaggacgacagcaggggtcttgtgcttcctgggtacaagtacctcggacccttcaacggactcgacaagggagagccggtcaacgaggcagacgccgcggccctcgagcacgacaaggcctacgaccggcagctcgacagcggagacaacccgtacctcaagtacgaccacgccgacgcggagtttcaggagcgccttaaagaagatacgtcttttgggggcaacctcggacgagcagtcttccaggcaaaaaagagggttcttgaacctctgggcctggttgaggagcctgttaagacggctccgggaaaaaagaggccggtagagcactctcctgtggagccagactcctcctcgggaaccggaaaagcgggcaaccagcctgcaagaaagagattgaatttcggtcagactggagacgcagactccgtacctgacccccagcctctcggacagccaccagcagccccctctggtctgggaactaatacgatggctacaggcagtggcgcaccaatggcagacaataacgatggcgccgacggagtgggtaattcctcgggaaattggcattgcgattccacatggatgggcgacagagtcatcaccaccagcacccgaacctgggctctgcccacctacaacaaccatctgtacaagcagatttccagccaatcaggagccagcaacgacaaccactactttggctacagcaccccttgggggtattttgacttcaacagattccactgccacttttcaccacgtgactggcaaagactcatcaacaacaactggggattccggcccaagagactcaacttcaagctctttaacattcaagtcagagaggtcacgcagaatgatggtacgacgacgattgccaataaccttaccagcacggttcaggtgtttactgactcggagtaccagctcccgtacgtcctcggctcggcgcatcaaggatgcctcccgccgttcccagcagacgtcttcatggtgccacagtatggatacctcaccctgaacaacgggagtcaggcagtaggacgctcttcattttactgcctggagtacttcccttctcagatgctgcgtaccggaaacaactttaccttcagctacacctttgaggatgttcctttccacagcagctacgctcacagccagagtttggaccgtctcatgaatcctctcatcgaccagtacctgtattacttgagcagaacaaacactccaagcggaaccaccacgcagtccaggcttcagttttctcaggccggagcgagtgacattcgggatcagtctaggaactggcttcctggaccctgttaccgccagcagcgagtatcaaagacatctgcggacaacaacaacagtgaatactcgtggattggagctaccaagtaccacctcaatggcagagactctctggtgaatccgggcccggcaatggccagccacaaggacgatgaagaaaagttttttcctcagagcggggttctcatctttggaaaacaaggatcagagaaaacaaatgtggacattgaaaaggtcatgattacagacgaagaggaaatcagaaccaccaatcccgtggccacggagcagtatggttctgtatctaccaacctccagagcggcaacacacaagcatctactgcagatgtcaacacacaaggcgttcttccaggcatggtctggcaggacagagacgtgtacctgcaggggcctatctgggcaaagattccgcacacggacggacattttcacccctctcccctcatgggcggattcggacttaaacaccctcctccacagattctcatcaaaaacaccccggtacctgcgaatccttcgaccaccttcagtgcggcaaagtttgcttccttcatcacacagtattccacggggcgggtcagcgtggagatcgagtgggagctacagaaggagaacagcaaacgctggaatcccgagatccagtacacttccaactacaacaaatctgttaatgtggactttactgtggacactaatggtgtgtattcagagcctcgccccattggcaccagatacctgactcgtaatctgtaa

SEQ ID NO: 4923 - protein, 735 aa, Adeno-associated virus
MAADGYLPDWLEDTLSEGIRQWWKLKPGPPPPKPAERHKDDSRGLVLPGYKYLGPFNGLDKGEPVNEADAAALEHDKAYDRQLDSGDNPYLKYDHADAEFQERLKEDTSFGGNLGRAVFQAKKRVLEPLGLVEEPVKTAPGKKRPVEHSPVEPDSSSGTGKAGNQPARKRLNFGQTGDADSVPDPQPLGQPPAAPSGLGTNTMATGSGAPMADNNDGADGVGNSSGNWHCDSTWMGDRVITTSTRTWALPTYNNHLYKQISSQSGASNDNHYFGYSTPWGYFDFNRFHCHFSPRDWQRLINNNWGFRPKRLNFKLFNIQVREVTQNDGTTTIANNLTSTVQVFTDSEYQLPYVLGSAHQGCLPPFPADVFMVPQYGYLTLNNGSQAVGRSSFYCLEYFPSQMLRTGNNFTFSYTFEDVPFHSSYAHSQSLDRLMNPLIDQYLYYLSRTNTPSGTTTQSRLQFSQAGASDIRDQSRNWLPGPCYRQQRVSKTSADNNNSEYSWIGATKYHLNGRDSLVNPGPAMASHKDDEEKFFPQSGVLIFGKQGSEKTNVDIEKVMITDEEEIRTTNPVATEQYGSVSTNLQSGNTQASTADVNTQGVLPGMVWQDRDVYLQGPIWAKIPHTDGHFHPSPLMGGFGLKHPPPQILIKNTPVPANPSTTFSAAKFASFITQYSTGRVSVEIEWELQKENSKRWNPEIQYTSNYNKSVNVDFTVDTNGVYSEPRPIGTRYLTRNL

SEQ ID NO: 4924 - DNA, 2217 bp, Adeno-associated virus
atggctgccgatggttatcttccagattggctcgaggacaacctctctgagggcattcgcgagtggtgggacttgaaacctggagccccgaaacccaaagccaaccagcaaaagcaggacgacggccggggtctggtgcttcctggctacaagtacctcggacccttcaacggactcgacaagggggagcccgtcaacgcggcggacgcagcggccctcgagcacgacaaggcctacgaccagcagctcaaagcgggtgacaatccgtacctgcggtataaccacgccgacgccgagtttcaggagcgtctgcaagaagatacgtcttttgggggcaacctcgggcgagcagtcttccaggccaagaagcgggttctcgaacctctcggtctggttgaggaaggcgctaagacggctcctggaaagaagagaccggtagagccatcaccccagcgttctccagactcctctacgggcatcggcaagacaggccagcagcccgcgaaaaagagactcaactttgggcagactggcgactcagagtcagtgcccgaccctcaaccaatcggagaaccccccgcaggcccctctggtctgggatctggtacaatggctgcaggcggtggcgctccaatggcagacaataacgaaggcgccgacggagtgggtagttcctcaggaaattggcattgcgattccgcatggctgggcgacagagtcatcaccaccagcacccgaccctgggccctccccacctacaacaaccacctctacaagcaaatctccaacgggacatcgggaggaagcaccaacgacaacacctacttcggctacagcaccccctgggggtattttgactttaacagattccactgccacttctcaccacgtgactggcagcgactcatcaacaacaactggggattccggcccaagagactcaacttcaagctcttcaacatccaggtcaaggaggtcacgcagaatgaaggcaccaagaccatcgccaataaccttaccagcacgattcaggtctttacggactcggaataccagctcccgtacgtcctcggctctgcgcaccagggctgcccgcctccgttcccggcggacgtcttcatgattcctcagtacgggtacctgactctgaacaacggcagtcaggccgtgggccgttcctccttctactgcctggagtactttccttctcaaatgcggagaacgggcaacaactttgagttcagctaccagtttgaggacgtgccttttcacagcagctacgcgcatagccaaagcctggaccggctgatgaaccccctcatcgaccagtacctgtactacctgtctcggactcagtccacgggaggtaccgcaggaactcagcagttgctattttctcaggccgggcctaataacatgtcggctcaggccaaaaactggctacccgggccctgctaccggcagcaacgcgtctccacgacactgtcgcaaaataacaacagcaactttgcttggaccggtgccaccaagtatcatctgaatggcagagactctctggtaaatcccggtgtcgctatggcaacgcacaaggacgacgaagagcgattttttccatccagcggagtcttgatgtttgggaaacagggagctggaaaagacaacgtggactatagcagcgttatgctaaccagtgaggaagaaatcaaaaccaccaacccagtggccacagaacagtacggcgtggtggccgataacctgcaacagcaaaacgccgctcctattgtaggggccgtcaacagtcaaggagccttacctggcatggtctggcagaaccgggacgtgtacctgcagggtcctatctgggccaagattcctcacacggacggcaactttcatccttcgccgctgatgggaggctttggactgaaacacccgcctcctcagatcctgattaagaatacacctgttcccgcggatcctccaactaccttcagtcaagccaagctggcgtcgttcatcacgcagtacagcaccggacaggtcagcgtggaaattgaatgggagctgcagaaagagaacagcaagcgctggaacccagagattcagtatacttccaactactacaaatctacaaatgtggactttgctgtcaatactgagggtacttattcagagcctcgccccattggcacccgttacctcacccgtaacctgtaa

SEQ ID NO: 4925 - protein, 738 aa, Adeno-associated virus
MAADGYLPDWLEDNLSEGIREWWDLKPGAPKPKANQQKQDDGRGLVLPGYKYLGPFNGLDKGEPVNAADAAALEHDKAYDQQLKAGDNPYLRYNHADAEFQERLQEDTSFGGNLGRAVFQAKKRVLEPLGLVEEGAKTAPGKKRPVEPSPQRSPDSSTGIGKTGQQPAKKRLNFGQTGDSESVPDPQPIGEPPAGPSGLGSGTMAAGGGAPMADNNEGADGVGSSSGNWHCDSAWLGDRVITTSTRPWALPTYNNHLYKQISNGTSGGSTNDNTYFGYSTPWGYFDFNRFHCHFSPRDWQRLINNNWGFRPKRLNFKLFNIQVKEVTQNEGTKTIANNLTSTIQVFTDSEYQLPYVLGSAHQGCPPPFPADVFMIPQYGYLTLNNGSQAVGRSSFYCLEYFPSQMRRTGNNFEFSYQFEDVPFHSSYAHSQSLDRLMNPLIDQYLYYLSRTQSTGGTAGTQQLLFSQAGPNNMSAQAKNWLPGPCYRQQRVSTTLSQNNNSNFAWTGATKYHLNGRDSLVNPGVAMATHKDDEERFFPSSGVLMFGKQGAGKDNVDYSSVMLTSEEEIKTTNPVATEQYGVVADNLQQQNAAPIVGAVNSQGALPGMVWQNRDVYLQGPIWAKIPHTDGNFHPSPLMGGFGLKHPPPQILIKNTPVPADPPTTFSQAKLASFITQYSTGQVSVEIEWELQKENSKRWNPEIQYTSNYYKSTNVDFAVNTEGTYSEPRPIGTRYLTRNL

SEQ ID NO: 4926 - protein, 735 aa, Adeno-associated virus
MAADGYLPDWLEDTLSEGIRQWWKLKPGPPPPKPAERHKDDSRGLVLPGYKYLGPFNGLDKGEPVNEADAAALEHDKAYDRQLDSGDNPYLKYNHADAEFQERLKEDTSFGGNLGRAVFQAKKRVLEPLGLVEEPVKTAPGKKRPVEHSPVEPDSSSGTGKAGQQPARKRLNFGQTGDADSVPDPQPLGQPPAAPSGLGSTTMATGSGAPMADNNEGADGVGNSSGNWHCDSQWLGDRVITTSTRTWALPTYNNHLYKQISSQSGASNDNHYFGYSTPWGYFDFNRFHCHFSPRDWQRLINNNWGFRPKRLNFKLFNIQVKEVTQNDGTTTIANNLTSTVQVFTDSEYQLPYVLGSAHQGCLPPFPADVFMVPQYGYLTLNNGSQAVGRSSFYCLEYFPSQMLRTGNNFQFSYTFEDVPFHSSYAHSQSLDRLMNPLVDQYLYYLNKTQTNSGTLQQSRLLFSQAGPTNMSLQAKNWLPGPCYRQQRLSKQANDNNNSNFPWTAATKYHLNGRDSLVNPGPAMASHKDDEEKFFPMHGTLIFGKQGTNANDADLENVMITDEEEIRTTNPVATEQYGTVSNNLQNSNTGPTTGTVNHQGALPGMVWQDRDVYLQGPIWAKIPHTDGHFHPSPLMGGFGLKHPPPQIMIKNTPVPANPPTNFSSAKFASFITQYSTGQVSVEIEWELQKENSKRWNPEIQYTSNYNKSVNVDFTVDTNGVYSEPRPIGTRYLTRNL

SEQ ID NO: 4927 - DNA, 3158 bp, Adeno-associated virus
gattgaatttagcggccgcgaattcgcccttgctgcgtcaactggaccaatgagaactttcctttcaatgattgcgtcgacaagatggtgatctggtgggaggagggaaagatgaccgccaaggtcgtggagtcggccaaagccattctcggaggaagcaaggtgcgcgcggaccagaaatgcaagtcctcggcccagatagacccgactcccgtgattgtcacctccaacaccaacatgtgcgccgtgattgacgggaactcaacgaccttcgaacaccagcagccgttgcaagaccggatgttcaaatttgaactcacccgccgtctggatcatgactttgggaaggtcaccaagcaggaagtcaaagactttttccggtgggcaaaggatcacgtggttgaggtggagcatgaattctacgtcaaaaagggtggagctaagaaaagacccgcccccagtgacgcagatataagtgagcccaaacgggcgcgcgagtcagttgcgcagccatcgacgtcagacgcggaagcttcgatcaactacgcgggcaggtaccaaaacaaatgttctcgtcacgtgggcatgaatctgatgctgtttccctgcagacaatgcgagagaatgaatcagaattcaaatatctgcttcactcacggacagaaagactgtttagagtgctttcccgtgtcagaatctcaacccgtttctgtcgtcaaaaaggcgtatcagaaactttgctacattcatcatatcatgggaaaggtgccagacgcttgcactgcctgcgatctggtcaatgtggatttggatgactgcatctctgaacaataaatgatttaaatcaggtatggctgccgatggttatcttccagattggctcgaggacactctctctgaaggaataagacagtggtggaagctcaaacctggcccaccaccaccaaagcccgcagagcggcataaggacgacagcaggggtcttgtgcttcctgggtacaagtacctcggacccttcaacggactcgacaagggggagccggtcaacgaggcagacgccgcggccctcgagcacgacaaggcctacgaccggcagctcgacagcggagacaacccgtacctcaagtacaaccacgccgacgcggagtttcaggagcgccttaaagaagatacgtcttttgggggcaacctcggacgagcagtcttccaggcaaaaaagagggttcttgaacctctgggcctggttgaggaacctgttaaaacggctccgggaaaaaagaggccggtagagcactctcctgtggagccagactcctcctcgggaaccggaaaagcgggccagcagcctgcaagaaaaagattgaatttcggtcagactggagacgcagactccgtacctgacccccagcctctcggacagccaccagcagccccctctggtctgggatctactacaatggctacaggcagtggcgcaccaatggcagacaataacgagggtgccgatggagtgggtaattcctcgggaaattggcattgcgattcccaatggctgggcgacagagtcatcaccaccagcacccgcacctgggccctgcccacctacaacaaccacctctacaagcaaatctccagccaatcaggagcctcaaacgacaaccactactttggctacagcaccccctgggggtattttgacttcaacagattccactgccacttttcaccacgtgactggcaaagactcatcaacaacaactggggattccgacccaagagactcaacttcaagctctttaacattcaagtcaaagaggtcacgcagaatgacggtacgacgacgattgccaataaccttaccagcacggttcaggtgtttactgactcggagtaccagctcccgtacgtcctcggctcggcgcatcaaggatgcctcccgccgtttccagcggacgtcttcatggtcccacagtatggatacctcaccctgaacaacgggagtcaggcagtaggacgctcttcattttactgcctggagtactttccttctcagatgctgcgtaccggaaacaactttcaattcagctacacttttgaagacgtgcctttccacagcagctacgctcacagccagagtctggatcggctgatgaatcctctggtcgaccagtacctgtattatctgaacaagacacaaacaaatagtggaactcttcagcagtctcggctactgtttagccaagctggacccaccaacatgtctcttcaagctaaaaactggctgcctggaccttgctacagacagcagcgtctgtcaaagcaggcaaacgacaacaacaacagcaactttccctggactgcagctacaaagtatcatctaaatggccgggactcgttggttaatccaggaccagctatggccagtcacaaggatgacgaagaaaagtttttccccatgcatggaacccttatatttggtaaacaaggaacaaatgccaacgacgcggatttggaaaatgtcatgattacagatgaagaagaaatcaggaccaccaatcccgtggctacggagcagtacggaactgtatcaaataatttgcaaaactcaaacactggtccaactactggaactgtcaatcaccaaggagcgttacctggtatggtgtggcaggatcgagacgtgtacctgcagggacccatttgggccaagattcctcacaccgatggacactttcatccttctccactgatgggaggttttggactcaaacacccacctcctcaaatcatgatcaaaaacactcccgttccagccaatcctcccacaaacttcagttctgccaagtttgcttctttcatcacacagtattccacggggcaggtcagcgtggagatcgagtgggagctgcagaaggagaacagcaaacgctggaatcccgaaattcagtacacttccaactacaacaaatctgttaatgtggactttactgtggacactaatggtgtgtattcagagcctcgccccattggcaccagatacctgactcgtaatctgtaattgcttgttaatcaataaaccgtttaattcgtttcagttgaactttggtctctgcgaagggcgaattcgtttaaacctgcaggactagtccctttagtga

SEQ ID NO: 4928 - protein, 735 aa, Adeno-associated virus
MAADGYLPDWLEDTLSEGIRQWWKLKPGPPPPKPAERHKDDSRGLVLPGYKYLGPFNGLDKGEPVNEADAAALEHDKAYDRQLDSGDNPYLKYNHADAEFQERLKEDTSFGGNLGRAVFQAKKRVLEPLGLVEEPVKTAPGKKRPVEHPPVEPDSSSGTGKAGQQPARKRLNFGQTGDADSVPDPQPLGQPPAAPSGLGSTTMATGSGAPMADNNEGADGVGNSSGNWHCDSQWLGDRVITTSTRTWALPTYNNHLYKQISSQSGASNDNHYFGYSTPWGYFDFNRFHCHFSPRDWQRLINNNWGFRPKRLNFKLFNIQVKEVTQNDGTTTIANNLTSTVQVFTDSEYQLPYVLGSAHQGCLPPFPADVFMVPQYGYLTLNNGSQAVGRSSFYCLEYFPSQMLRTGNNFQFSYTFEDVPFHSSYAHSQSLDRLMNPLIDQYLYYLNKTQTNSGTLQQSRLLFSQAGPTNMSLQAKNRLPGPCYRQQRLSKQANDNNNSNFPWTAATKYHLNGRDSLVNPGPAMASHKDDEEKFFPMHGTLIFGKQGTNANDADLENVMITDEEEIRTTNPVATEQYGTVSNNLQNSNTGPTTGTVNHQGALPGMVWQDRDVYLQGPIWAKIPHTDGHFHPSPLVGGFGLKHPPPQIMIKNTPVPANPPTNFSSAKFASFITQYSTGQVSVEIEWELQKENSKRWNPEIQYTSNYNKSVNVDFTVDTNGVYSEPRPIGTRYLTRNL

SEQ ID NO: 4929 - DNA, 3159 bp, Adeno-associated virus
gattgaatttagcggccgcgaattcgcccttgctgcgtcaactggaccaatgagaactttcctttcaatgattgcgtcgacaagatggtgatctggtgggaggagggaaagatgaccgccaaggtcgtggagtcggccaaagccattctcggaggaagcaaggtgcgcgtggaccagaaatgcaagtcctcggcccagatagacccgactcccgtgattgtcacctccaacaccgacatgtgcgccgtgattgacgggaactcaacgaccttcgaacaccagcagccgttgcaagaccggatgttcaaatttgaactcacccgccgtctggatcatgactttgggaaggtcaccaagcaggaagtcaaagactttttccggtgggcaaaggatcacgtggttgaggtggagcatgaattctacgtcaaaaagggtggagctaagaaaagacccgcccccagtgacgcagatataagtgagcccaaacgggcgcgcgagtcagttgcgcagccatcgacgtcagacgcggaagcttcgatcaactacgcggacaggtaccaaaacaaatgttctcgtcacgtgggcatgaatctgatgctgtttccctgcagacaatgcgagagaatgaatcagaattcaaatatctgcttcactcacggacagaaagactgtttagagtgctttcccgtgtcagaatctcaacccgtttctgtcgtcaaaaaggcgtatcagaaactttgctacattcatcatatcatgggaaaggtgccagacgcttgcactgcctgcgatctggtcaatgtggatttggatgactgcatctctgaacaataaatgatttaaatcaggtatggctgccgatggttatcttccagattggctcgaggacactctctctgaaggaataagacagtggtggaagctcaaacctggcccaccaccaccaaagcccgcagagcggcataaggacgacagcaggggtcttgtgcttcctgggtacaagtacctcggacccttcaacggactcgacaagggggagccggtcaacgaggcagacgccgcggccctcgagcacgacaaggcctacgaccggcagctcgacagcggagacaacccgtacctcaagtacaaccacgccgacgcggagtttcaggagcgccttaaagaagatacgtcttttgggggcaacctcggacgagcagtcttccaggcaaaaaagagggttcttgaacctctgggcctggttgaggaacctgttaaaacggctccgggaaaaaagaggccggtagagcaccctcctgtggagccagactcctcctcgggaaccggaaaagcgggccagcagcctgcaagaaaaagattgaatttcggtcagactggagacgcagactccgtacctgacccccagcctctcggacagccaccagcagccccctctggtctgggatctactacaatggctacaggcagtggcgcaccaatggcagacaataacgagggtgccgatggagtgggtaattcctcgggaaattggcattgcgattcccaatggctgggcgacagagtcatcaccaccagcacccgcacctgggccctgcccacctacaacaaccacctctacaagcaaatctccagccaatcaggagcctcaaacgacaaccactactttggctacagcaccccctgggggtattttgacttcaacagattccactgccacttttcaccacgtgactggcaaagactcatcaacaacaactggggattccgacccaagagactcaacttcaagctctttaacattcaagtcaaagaggtcacgcagaatgacggtacgacgacgattgccaataaccttaccagcacggttcaggtgtttactgactcggagtaccagctcccgtacgtcctcggctcggcgcatcaaggatgcctcccgccgtttccagcggacgtcttcatggtcccacagtatggatacctcaccctgaacaacgggagtcaggcagtaggacgctcttcattttactgcctggagtactttccttctcagatgctgcgtaccggaaacaactttcagttcagctacacttttgaagacgtgcctttccacagcagctacgctcacagccagagtctggatcggctgatgaatcctctgatcgaccagtacctgtattatctgaacaagacacaaacaaatagtggaactcttcagcagtctcggctactgtttagccaagctggacccaccaacatgtctcttcaagctaaaaaccggctgcctggaccttgctacagacagcagcgtctgtcaaagcaggcaaacgacaacaacaacagcaactttccctggaccgcagctacaaagtatcatctaaatggccgggactcgttggttaatccaggaccagctatggccagtcacaaggatgacgaagaaaagtttttccccatgcatggaacccttatatttggtaaacaaggaacaaatgccaacgacgcggatttggaaaatgtcatgattacagatgaagaagaaatcaggaccaccaatcccgtggctacggagcagtacggaactgtatcaaataatttgcaaaactcaaacactggtccaactactggaactgtcaatcaccaaggagcgttacctggtatggtgtggcaggatcgagacgtgtacctgcagggacccatttgggccaagattcctcacaccgatggacactttcatccttctccactggtgggaggttttggactcaaacacccacctcctcaaatcatgatcaaaaacactcccgttccagccaatcctcccacaaacttcagttctgccaagtttgcttctttcatcacacagtattccacggggcaggtcagcgtggagatcgagtgggagctgcagaaggagaacagcaaacgctggaatcccgaaattcagtacacttccaactacaacaaatctgttaatgtggactttactgtggacactaatggtgtgtattcagagcctcgccccattggcaccagatacctgactcgtaatctgtaattgcttgttaatcaataaaccgtttaattcgtttcagttgaactttggtctctgcgaagggcgaattcgtttaaacctgcaggactagtccctttagtgag

SEQ ID NO: 4930 - DNA, 2208 bp, Adeno-associated virus
atggctgccgatggttatcttccagattggctcgaggacactctctctgaaggaataagacagtggtggaagctcaaacctggcccaccaccaccaaagcccgcagagcggcataaggacgacagcaggggtcttgtgcttcctgggtacaagtaccttggacccttcaacggactcgacaagggagagccggtcaacgaggcagacgccgcggccctcgagcacgacaaggcctacgaccggcagctcgacagcggagacaacccgtaccccaagtacaaccacgccgacgcggagttccaggagcgtcttaaagaagatacgtcttttgggggcaacctcggacgagcagtcttccaggcgaaaaagagggttcttgaacctctgggcctggttgaggaacctgttaagacggctccgggaaaaaagaggccggtagagcactctcctgcggagccagactcctcctcgggaaccggaaaagcgggccagcagcctgcaagaaagagattgaatttcggtcagactggagacgcagactccgtacctgacccccagcctctcggacagccaccagcagccccctctggtctgggaactaatacgatggctacaggcagtggcgcaccaatggcagacaataacgagggcgccgacggagtgggtaattcctcgggaaattggcattgcgattccacatggatgggcgacagagtcatcaccaccagcacccgcacctgggctctgcccacctacaacaaccacctctacaagcagatttccagccaatcaggagcctcaaacgacaaccactactttggctacagcaccccttgggggtattttgacttcaacagattccactgccacttttcgccacgtgactggcaaagactcatcaacaacaattggggattccggcccaaaagactcaacttcaagctctttaacattcaagtcaaggaggtcacgcagaatgacggtacgacgacgattgccaataaccttaccagcacggttcaggtgtttactgactcggagtaccagctcccgtacgtcctcggctcggcgcatcaaggatgcctcccgccgttcccagcagacgtcttcatggtgccacagtatggatacctcaccctgaacaacgggagtcaggcagtaggacgctcttcattttactgcctggagtactttccttctcagatgctgcgtaccggaaacaactttaccttcagctacacctttgaggacgttcctttccacagcagctacgcccacagccagagtttggaccgtctcatgaatcctctcatcgaccagtacctgtattacttgagcagaacaaacactccaagcggaaccaccacgcagtcaaggcttcagttttctcaggccggagcaagtgacattcgggaccagtctaggaactggcttcctggaccctgttaccgccagcagcgagtatcaaagacatctgcggataacaacaacagtgaatactcgtggactggagctaccaagtaccaccttaatggaagagactctctggtgaatccgggcccggccatggccagccacaaggacgatgaagaaaagttttttcctcagagcggggttctcatctttggaaaacaagactcgggaaaaactaatgtggacattgaaaaggtcatgattacagacgaagaggaaatcaggaccaccaatcccgtggctacggagcagtatggttctgtatctaccaacctccagagcggcaacacacaagcagctacctcagatgtcaacacacaaggcgttcttccaggcatggtgtggcaggacagagacgtgtacctgcaggggcccatctgggcaaagattccacacacggacggacattttcacccctctcccctcatgggcggattcggacttaaacaccctcccccgcagattctcatcaagaacaccccggtacctgcgaatccttcgactaccttcagtgcggcaaagtttgcttccttcattacacagtactccacggggcaggtcagcgtggagatcgagtgggagctgcagaaggagaacagcaaacgctggaatcccgagattcagtacacttccaactacaacaaatctgttaatgtggactttactgtggacactaatggtgtgtattcagagcctcgccccattggcaccaggtacctgactcgtaatctgtaa

SEQ ID NO: 4931 - protein, 735 aa, Adeno-associated virus
MAADGYLPDWLEDTLSEGIRQWWKLKPGPPPPKPAERHKDDSRGLVLPGYKYLGPFNGLDKGEPVNEADAAALEHDKAYDRQLDSGDNPYPKYNHADAEFQERLKEDTSFGGNLGRAVFQAKKRVLEPLGLVEEPVKTAPGKKRPVEHSPAEPDSSSGTGKAGQQPARKRLNFGQTGDADSVPDPQPLGQPPAAPSGLGTNTMATGSGAPMADNNEGADGVGNSSGNWHCDSTWMGDRVITTSTRTWALPTYNNHLYKQISSQSGASNDNHYFGYSTPWGYFDFNRFHCHFSPRDWQRLINNNWGFRPKRLNFKLFNIQVKEVTQNDGTTTIANNLTSTVQVFTDSEYQLPYVLGSAHQGCLPPFPADVFMVPQYGYLTLNNGSQAVGRSSFYCLEYFPSQMLRTGNNFTFSYTFEDVPFHSSYAHSQSLDRLMNPLIDQYLYYLSRTNTPSGTTTQSRLQFSQAGASDIRDQSRNWLPGPCYRQQRVSKTSADNNNSEYSWTGATKYHLNGRDSLVNPGPAMASHKDDEEKFFPQSGVLIFGKQDSGKTNVDIEKVMITDEEEIRTTNPVATEQYGSVSTNLQSGNTQAATSDVNTQGVLPGMVWQDRDVYLQGPIWAKIPHTDGHFHPSPLMGGFGLKHPPPQILIKNTPVPANPSTTFSAAKFASFITQYSTGQVSVEIEWELQKENSKRWNPEIQYTSNYNKSVNVDFTVDTNGVYSEPRPIGTRYLTRNL

SEQ ID NO: 4932 - DNA, 2208 bp, Adeno-associated virus
atggctgccgatggttatcttccagattggctcgaggacactctctctgaaggaataagacagtggtggaagctcaaacctggcccaccaccaccaaagcccgcagagcggcataaggacgacagcaggggtcttgtgcttcctgggtacaagtaccttggacccttcaacggactcgacaagggagagccggtcaacgaggcagacgccgcggccctcgagcacgacaaggcctacgaccggcagctcgacggcggagacaacccgtacctcaagtacaaccacgccgacgcggagttccaggagcgtcttaaagaagatacgtcttttgggggcaacctcggacgagcagtcttccaggcgaaaaagagggttcttgaacctctgggcctggttgaggaacctgttaagacggctccgggaaaaaagaggccggtagagcactctcttgcggagccagactcctcctcgggaaccggaaaagcgggccagcagcctgcaagaaggagattgaatttcggtcagactggagacgcagactccgtacctgacccccagcctctcggacagccaccagcagccccctctggtctgggaactaatacgatggctacaggcagtggcgcaccaatggcagacaataacgagggcgccgacggagtgggtaattcctcgggaaattggcattgcgattccacatggatgggcgacagagtcatcaccaccagcacccgcacctgggctctgcccacctacaacaaccacctctacaggcagatttccagccaatcaggagcctcaaacgacaaccactactttggctacagcaccccttgggggtattttgacttcaacagattccactgccacttttcgccacgtgactggcaaagactcatcaacaacaattggggatcccggcccaaaagactcaacttcaagctctttaacattcaagtcaaggaggtcacgcagaatgacggtacgacgacgattgccaataaccttaccagcacggttcaggtgtttactgactcggagtaccagctcccgtacgtcctcggctcggcgcatcaaggatgcctcccgccgttcccagcagacgtcttcatggtgccacagtatggatacctcaccctgaacaacgggagtcaggcagtaggacgctcttcattttactgcctggagtactttccttctcagatgctgcgtaccggaaacaactttaccttcagctacacctttgaggacgttcctttccacagcagctacgcccacagccagagtttggaccgtctcatgaatcctctcgtcgaccagtacctgtattacttgagcagaacaaacactccaagcggaaccaccacgcagtcaaggcttcagttttctcaggccggagcaagtgacattcgggaccagtctaggaactggcttcctggaccctgttaccgccagcagcgagtatcaaagacatctgcggataacaacaacagtgaatactcgtggactggagctaccaagtaccaccttaatggaagagactctctggtgaatccgggcccggccatggccagccacaaggacgatgaagaaaagttttttcctcagagcggggttctcatctttggaaaacaagactcgggaaaaactaatgtggacattgaaaaggtcatgattacagacgaagaggaaatcaggaccaccaatcccgtggctacggagcagtatggttctgtatctaccaacctccagagcggcaacacacaagcagctacctcagatgtcaacacacaaggcgttcttccaggcatggtgtggcaggacagagacgtgtacctgcaggggcccatctgggcaaagattccacacacggacggacattttcacccctctcccctcatgggcggattcggacttaaacaccctcccccgcagattctcatcaagaacaccccggtacctgcgaatccttcgactaccttcagtgcggcaaagtttgcttccttcattacacagtactccacggggcaggtcagcgtggagatcgagtgggagctgcagaaggagaacagcaaacgctggaatcccgagattcagtacacttccaactacaacaaatctgttaatgtggactttactgtggacactaatggtgtgtattcagagcctcgccccattggcaccagatacctgactcgtaatctgtaa

SEQ ID NO: 4933 - protein, 735 aa, Adeno-associated virus
MAADGYLPDWLEDTLSEGIRQWWKLKPGPPPPKPAERHKDDSRGLVLPGYKYLGPFNGLDKGEPVNEADAAALEHDKAYDRQLDGGDNPYLKYNHADAEFQERLKEDTSFGGNLGRAVFQAKKRVLEPLGLVEEPVKTAPGKKRPVEHSLAEPDSSSGTGKAGQQPARRRLNFGQTGDADSVPDPQPLGQPPAAPSGLGTNTMATGSGAPMADNNEGADGVGNSSGNWHCDSTWMGDRVITTSTRTWALPTYNNHLYRQISSQSGASNDNHYFGYSTPWGYFDFNRFHCHFSPRDWQRLINNNWGSRPKRLNFKLFNIQVKEVTQNDGTTTIANNLTSTVQVFTDSEYQLPYVLGSAHQGCLPPFPADVFMVPQYGYLTLNNGSQAVGRSSFYCLEYFPSQMLRTGNNFTFSYTFEDVPFHSSYAHSQSLDRLMNPLVDQYLYYLSRTNTPSGTTTQSRLQFSQAGASDIRDQSRNWLPGPCYRQQRVSKTSADNNNSEYSWTGATKYHLNGRDSLVNPGPAMASHKDDEEKFFPQSGVLIFGKQDSGKTNVDIEKVMITDEEEIRTTNPVATEQYGSVSTNLQSGNTQAATSDVNTQGVLPGMVWQDRDVYLQGPIWAKIPHTDGHFHPSPLMGGFGLKHPPPQILIKNTPVPANPSTTFSAAKFASFITQYSTGQVSVEIEWELQKENSKRWNPEIQYTSNYNKSVNVDFTVDTNGVYSEPRPIGTRYLTRNL

SEQ ID NO: 4934 - protein, 738 aa, Adeno-associated virus
MAADGYLPDWLEDNLSEGIREWWDLKPGAPKPKANQQKQDDGRGLVLPGYKYLGPFNGLDKGEPVNAADAAALEHDKAYDQQLKAGDNPYLRYNHADAEFQERLQEDTSFGGNLGRAVFQAKKRVLEPLGLVEEAAKTAPGKKRPVEPSPQRSPDSSAGIGKKGQQPAKKRLNFGQTGDSESVPDPQPIGEPPAGPSGLGSGTMAAGGGAPMADNNEGADGVGSSSGNWHCDSTWLGDRVITTSTRTWALPTYNNHLYKQISNGTSGGSTNDNTYFGYSTPWGYFDFNRFHCHFSPRDWQRLINNNWGFRPKRLSFKLFNIQVKEVTQNEGTETIANNLTSTIQVFTDSEYQLPYVLGSAHQGCLPPFPADVFMIPQYGYLTLNNGSQAVGRSSFYCLEYFPSQMLRTGNNFEFSYTFEDVPFHSSCAHSQSSDRLMNPLIDQYLYYLSRTRSTGGTQGTQQLLFSQAGPANMSAQAKNWLPGPCYRQQRVSTTLSQNNNSNFAWTGATKYHLNGRDSLVNPGVAMATHKDDEERFFPSSGVLMFGKQGAGRDNVDYSSVMLTSEEEIKTTNPVATEQYGVVADNLQQTNTGPIVGNVNSQGALPGMVWQNRDVYLQGPIWAKIPHTDGNFHPSPLMGGFGLKHPPPQILIKNTPVPADPPTTFSQAKLASFITQYSTGQVSVEIEWELQKENSKRWNPEIQYTSNYYKSTNVDFAVNTEGTYSEPRPIGTRYLTRNL

SEQ ID NO: 4935 - DNA, 2217 bp, Adeno-associated virus
atggctgctgacggttatcttccagattggctcgaggacaacctctctgagggcattcgcgagtggtgggacctgaaacctggagcccccaagcccaaggccaaccagcagaagcaggacgacggccggggtctggtgcttcttggctacaagtacctcggacccttcaacggactcgacaagggggagcccgtcaatgcggcggacgcagcggccctcgagcacgacaaggcctacgaccagcagctcaaagcgggtgacaatccgtacctgcggtataaccacgccgacgccgagtttcaggagcgtctgcaagaagatacgtcttttgggggcaacctcgggcgagcagtcttccaggccaagaagcgggttctcgaacctctcggtctggttgaggaagctgctaagacggctcctggaaagaagagaccggtagaaccgtcacctcagcgttcccccgactcctccacgggcatcggcaagaaaggccagcagcccgctaaaaagagactgaactttggtcagactggcgactcagagtcagtccccgaccctcaaccaatcggagaaccaccagcaggcccctctggtctgggatctggtacaatggctgcaggcggtggcgctccaatggcagacaataacgaaggcgccgacggagtgggtagttcctcaggaaattggcattgcgattccacatggctgggcgacagagtcatcaccaccagcacccgaacctgggccctgcccacctacaacaaccacctctacaagcaaatatccaatgggacatcgggaggaagcaccaacgacaacacctacttcggctacagcaccccctgggggtattttgacttcaacagattccactgccacttctcaccacgtgactggcagcgactcatcaacaacaactggggattccggccaaaaagactcagcttcaagctcttcaacatccaggtcaaggaggtcacgcagaatgaaggcaccaagaccatcgccaataaccttaccagcacgattcaggtatttacggactcggaataccagctgccgtacgtcctcggctccgcgcaccagggctgcctgcctccgttcccggcggacgtcttcatgattccccagtacggctaccttacactgaacaatggaagtcaagccgtaggccgttcctccttctactgcctggaatattttccatctcaaatgctgcgaactggaaacaattttgaattcagctacaccttcgaggacgtgcctttccacagcggctacgcacacagccagagcttggaccgactgatgaatcctctcatcgaccagtacctgtactacttatccagaactcagtccacaggaggaactcaaggtacccagcaattgttattttctcaagctgggcctgcaaacatgtcggctcaggctaagaactggctacctggaccttgctaccggcagcagcgagtctctacgacactgtcgcaaaacaacaacagcaactttgcttggactggtgccaccaaatatcacctgaacggaagagactctttggtaaatcccggtgtcgccatggcaacccacaaggacgacgaggaacgcttcttcccgtcgagtggagtcctgatgtttggaaaacagggtgctggaagagacaatgtggactacagcagcgttatgctaaccagcgaagaagaaattaaaaccactaaccctgtagccacagaacaatacggtgtggtggctgacaacttgcagcaaaccaatacagggcctattgtgggaaatgtcaacagccaaggagccttacctggcatggtctggcagaaccgagacgtgtacctgcagggtcccatctgggccaagattcctcacacggacggcaacttccacccttcaccgctaatgggaggatttggactgaagcacccacctcctcagatcctgatcaagaacacgccggtacctgcggatcctccaacgacgttcagccaggcgaaattggcttccttcattacgcagtacagcaccggacaggtcagcgtggaaatcgagtgggagctgcagaaggagaacagcaaacgctggaacccagagattcagtacacttcaaactactacaaatctacaaatgtggactttgctgtcaatacagagggaacttattctgagcctcgccccattggtactcgttacctcacccgtaatctgtaa

SEQ ID NO: 4936 - protein, 738 aa, Adeno-associated virus
MAADGYLPDWLEDNLSEGIREWWDLKPGAPKPKANQQKQDDGRGLVLLGYKYLGPFNGLDKGEPVNAADAAALEHDKAYDQQLKAGDNPYLRYNHADAEFQERLQEDTSFGGNLGRAVFQAKKRVLEPLGLVEEAAKTAPGKKRPVEPSPQRSPDSSTGIGKKGQQPAKKRLNFGQTGDSESVPDPQPIGEPPAGPSGLGSGTMAAGGGAPMADNNEGADGVGSSSGNWHCDSTWLGDRVITTSTRTWALPTYNNHLYKQISNGTSGGSTNDNTYFGYSTPWGYFDFNRFHCHFSPRDWQRLINNNWGFRPKRLSFKLFNIQVKEVTQNEGTKTIANNLTSTIQVFTDSEYQLPYVLGSAHQGCLPPFPADVFMIPQYGYLTLNNGSQAVGRSSFYCLEYFPSQMLRTGNNFEFSYTFEDVPFHSGYAHSQSLDRLMNPLIDQYLYYLSRTQSTGGTQGTQQLLFSQAGPANMSAQAKNWLPGPCYRQQRVSTTLSQNNNSNFAWTGATKYHLNGRDSLVNPGVAMATHKDDEERFFPSSGVLMFGKQGAGRDNVDYSSVMLTSEEEIKTTNPVATEQYGVVADNLQQTNTGPIVGNVNSQGALPGMVWQNRDVYLQGPIWAKIPHTDGNFHPSPLMGGFGLKHPPPQILIKNTPVPADPPTTFSQAKLASFITQYSTGQVSVEIEWELQKENSKRWNPEIQYTSNYYKSTNVDFAVNTEGTYSEPRPIGTRYLTRNL

SEQ ID NO: 4937 - protein, 735 aa, Adeno-associated virus
MAADGYLPDWLEDTLSEGIRQWWKLKPGPPPPKPAERHKDDSRGLVLPGYKYLGPFNGLDKGEPVNEADAAALEHDKAYDRQLDSGDNPYLKYNHADAEFQERLKEDTSFGGNLGRAVFQAKKRVLEPLGLVEPPVKTAPGKKRPVEHSPAEPDSSSGTGKAGQQPARKRLNFGQTGDADSVPDPQPLGQPPAAPSGLGSTTMATGSGAPMADNNEGADGVGNSSGNWHCDSQWLGDRVITTSTRTWALPTYNNHLYKQISSQSGASNDNHYFGYSTPWGYFDFNRFHCHFSPRDWQRLINNNWGFRPKRLNFKLFNIQVKEVTQNDGTTTIANNLTSTVQVFTDSEYQLPYVLGSAHQGCLPPFPADVFMVPQYGYLTLNNGSQAVGRSSFYCLEYFPSQMLRTGNNFQFSYTFEDVPFHSSYAHSQSLDRLMNPLIDQYLYYLNKTQSNSGTLQQSRLLFSQAGPTSMSLQAKNWLPGPCYRQQRLSKQANDNNNSNFPWTAATKYHLNGRDSLVNPGPAMASHKDDEEKFFPMHGTLIFGKQGTNANDADLDNVMITDEEEIRTTNPVATEQYGYVSNNLQNSNTGPTTGTVNHQGALPGMVWQDRDVYLQGPIWAKIPHTDGHFHPSPLMGGFGLKHPPPQIMIKNTPVPANPPTNFSSAKFASFITQYSTGQVSVEIEWELQKENSKRWNPEIQYTSNYNKSVNVDFTVDTNGVYSEPRPIGTRYLTRNL

SEQ ID NO: 4938 - protein, 735 aa, Adeno-associated virus
MAADGYLPDWLEDTLSEGIRQWWKLKPGPPPPKPAERHKDDSRGLVLPGYKYLGPFNGLDKGEPVNEADAAALEHDKAYDRQLDSGDNPYLKYNHADAEFQERLKEDTSFGGNLGRAVFQAKKRVLEPLGLVEGPVKTAPGKKRPVEHSPAEPDSSSGTGKAGQQPARKRLNFGQTGDADSVPDPQPLGQPPAAPSGLGSTTMATGSGAPMADNNEGADGVGNSSGNWHCDSQWLGDRVITTSTRTWALPTYNNHLYKQISSQSGASNDNHYFGYSTPWGYFDFNRFHCHFSPRDWQRLINNNWGFRPKRLNFKLFNIQVKEVTQNDGTTTIANNLTSTVQVFTDSEYQLPYVLGSAHQGCLPPFPADVFMVPQYGYLTLNNGSQAVGRSSFYCLEYFPSQMLRTGNNFQFSYTFEDVPFHSSYAHSQSLDRLMNPLIDQYLYYLNKTQSNSGTLQQSRLLFSQAGPTSMSLQAKNWLPGPCYRQQRLSKQANDNNNSNFPWTAATKYHLNGRDSLVNPGPAMASHKDDEEKFFPMHGTLIFGKQGTNANDADLDNVMITDEEEIRTTNPVATEQYGYVSNNLQNSNTGPTTGTVNHQGALPGMVWQDRDVYLQGPIWAKIPHTDGHFHPSPLMGGFGLKHPPPQIMIKNTPVPANPPTNFSSAKFASFITQYSTGQVSVEIEWELQKENSKRWNPEIQYTSNYNKSVNVDFTVDTNGVYSEPRPIGTRYLTRNL

SEQ ID NO: 4939 - DNA, 2208 bp, Adeno-associated virus
atggctgccgatggttatcttccagattggctcgaggacactctctctgaaggaataagacagtggtggaagctcaaacctggcccaccaccaccaaagcccgcagagcggcataaggacgacagcaggggtcttgtgcttcctgggtacaagtacctcggacccttcaacggactcgacaagggggagccggtcaacgaggcagacgccgcggccctcgagcacgacaaggcctacgaccggcagctcgacagcggagacaacccgtacctcaagtacaaccacgccgacgcggagtttcaggagcgtcttaaagaagatacgtcttttgggggcaacctcggacgagcagtcttccaggcgaaaaagagggttcttgaacctctgggcctggttgagggacctgttaagacggctccgggaaaaaagaggccggtagagcactctcctgcggagccagactcctcctcgggaaccggaaaagcgggccagcagcctgcaagaaaaagattgaattttggtcagactggagacgcagactccgtacctgacccccagcctctcggacagccaccagcagccccctctggtttgggatctactacaatggctacaggcagtggcgcaccaatggcagacaataacgagggtgccgatggagtgggtaattcctcaggaaattggcattgcgattcccaatggctgggcgacagagtcatcaccaccagcacccgaacctgggccctgcccacctacaacaaccacctctacaagcaaatctcaagccaatcaggagcctcaaacgacaaccactactttggctacagcaccccttgggggtattttgacttcaacagattccactgccacttttcaccacgtgactggcaaagactcatcaacaacaactggggattccgacccaagagactcaacttcaagctctttaacattcaagtcaaagaggtcacgcagaatgacggtacgacgacgattgccaataaccttaccagcacggttcaggtgtttactgactcggagtaccagctcccgtacgtcctcgggtcggcgcatcaaggatgcctcccgccgtttccagcggacgtcttcatggtcccacagtatggatacctcaccctgaacaacgggagtcaggcggtaggacgctcttccttttactgcctggagtactttccttctcagatgcttcgtactggaaacaactttcagttcagctacacctttgaagacgttcctttccacagcagctacgctcacagccagagtctggatcggctgatgaatcctctgatcgaccagtacctgtattatctgaacaaaacacaatcaaatagtggaactcttcagcagtctcggctactgtttagtcaagctggacccaccagcatgtctcttcaagctaaaaactggctacctggaccttgctacagacagcagcgtctgtcaaagcaggcaaacgacaacaacaacagcaactttccctggactgcggctacaaagtatcacctaaatggccgggactcgttggttaatccaggaccagctatggccagtcacaaagacgatgaagaaaagtttttccccatgcatggaaccctgatatttggtaaacaaggaacaaatgctaacgacgcggatttggacaatgtcatgattacagatgaagaagaaatccgcaccaccaatcccgtggctacggagcagtacggatatgtgtcaaataatttgcaaaactcaaatactggtccaactactggaactgtcaatcaccaaggagcgttacctggcatggtgtggcaggatcgagacgtgtacctgcagggacccatttgggccaagattcctcacaccgatggacactttcatccttctccactgatgggaggttttgggctcaaacacccgcctcctcagatcatgatcaaaaacactcccgttccagccaatcctcccacaaacttcagttctgccaagtttgcttctttcatcacacagtattccacggggcaggtcagcgtggagatcgagtgggagctgcagaaagagaacagcaaacgctggaatcccgaaattcagtacacttccaactacaacaaatctgttaatgtggactttactgtggacactaatggcgtgtattcagagcctcgccccattggcaccagatacctgactcgtaatctgtaa

SEQ ID NO: 4940 - DNA, 2211 bp, Adeno-associated virus
atggctgccgatggttatcttccagattggctcgaggacaacctctctgagggcattcgcgagtggtgggacttgaaacctggagccccgaagcccaaagccaaccagcaaaagcaggacgacggccggggtctggtgcttcctggctacaagtacctcggacccttcaacggactcgacaagggggagcccgtcaacgcggcggacgcagcggccctcgagcacgacaaggcctacgaccagcagctcaaagcgggtgacaatccgtacctgcggtataaccacgccgacgccgagtttcaggagcgtctgcaagaagatacgtcttttgggggcaacctcgggcgagcagtcttccaggccaagaagcgggttctcgaacctctcggtctggttgaggaaggcgctaagacggctcctggaaagaaacgtccggtagagcagtcgccacaagagccagactcctcctcgggcatcggcaagacaggccagcagcccgctaaaaagagactcaattttggtcagactggcgactcagagtcagtccccgatccacaacctctcggagaacctccagcaacccccgctgctgtgggacctactacaatggcttcaggcggtggcgcaccaatggcagacaataacgaaggcgccgacggagtgggtaatgcctcaggaaattggcattgcgattccacatggctgggcgacagagtcatcaccaccagcacccgcacctgggccttgcccacctacaataaccacctctacaagcaaatctccagtgcttcaacgggggccagcaacgacaaccactacttcggctacagcaccccctgggggtattttgatttcaacagattccactgccacttttcaccacgtgactggcagcgactcatcaacaacaattggggattccggcccaagagactcaacttcaaactcttcaacatccaagtcaaggaggtcacgacgaatgatggcgtcacaaccatcgctaataaccttaccagcacggttcaagtcttctcggactcggagtaccagcttccgtacgtcctcggctctgcgcaccagggctgcctccctccgttcccggcggacgtgttcatgattccgcaatacggctacctgacgctcaacaatggcagccaagccgtgggacgttcatccttttactgcctggaatatttcccttctcagatgctgagaacgggcaacaactttaccttcagctacacctttgaggaagtgcctttccacagcagctacgcgcacagccagagcctggaccggctgatgaatcctctcatcgaccaatacctgtattacctgaacagaactcaaaatcagtccggaagtgcccaaaacaaggacttgctgtttagccgtgggtctccagctggcatgtctgttcagcccaaaaactggctacctggaccctgttatcggcagcagcgcgtttctaaaacaaaaacagacaacaacaacagcaattttacctggactggtgcttcaaaatataacctcaatgggcgtgaatccatcatcaaccctggcactgctatggcctcacacaaagacgacgaagacaagttctttcccatgagcggtgtcatgatttttggaaaagagagcgccggagcttcaaacactgcattggacaatgtcatgattacagacgaagaggaaattaaagccactaaccctgtggccaccgaaagatttgggaccgtggcagtcaatttccagagcagcagcacagaccctgcgaccggagatgtgcatgctatgggagcattacctggcatggtgtggcaagatagagacgtgtacctgcagggtcccatttgggccaaaattcctcacacagatggacactttcacccgtctcctcttatgggcggctttggactcaagaacccgcctcctcagatcctcatcaaaaacacgcctgttcctgcgaatcctccggcggagttttcagctacaaagtttgcttcattcatcacccaatactccacaggacaagtgagtgtggaaattgaatgggagctgcagaaagaaaacagcaagcgctggaatcccgaagtgcagtacacatccaattatgcaaaatctgccaacgttgattttactgtggacaacaatggactttatactgagcctcgccccattggcacccgttaccttacccgtcccctgtaa

SEQ ID NO: 4941 - DNA, 2208 bp, Adeno-associated virus
atggctgccgatggttatcttccagattggctcgaggacactctctctgaaggaacaagacagtggtggaagctcaaacctggcccaccaccaccaaagcccgcagagcggcataaggacgacagcaggggtcttgtgcttcctgggtacaagtacctcggacccttcaacggactcgacaagggggagccggtcaacgaggcagacgccgcggccctcgagcacgacaaggcctacgaccggcagctcgacagcggagacaacccgtacctcaagtacaaccacgccgacgcggagtttcaggagcgtcttaaagaagatacgtcttttgggggcaacctcggacgagcagtcttccaggcgaaaaagagggttcttgaacctctgggcctggttgaggaacctgttaagacggctccgggaaaaaagaggccggtagagcactctcctgcggagccagactcctcctcgggaaccggaaaagcgggccagcagcctgcaagaaaaagattgaattttggtcagactggagacgcagactccgtacctgacccccagcctctcggacagccaccagcagccccctctggtttgggatctactacaatggctacaggcagtggcgcaccaatggcagacaataacgagggtgccgatggagtgggtaattcctcaggaaattggcattgcgattcccaatggctgggcgacagagtcatcaccaccagcacccgaacctgggccctgcccacctacaacaaccacctctacaagcaaatctcaagccaatcaggagcctcaaacgacaaccactactttggctacagcaccccttgggggtattttgacttcaacagattccactgccacttttcaccacgtgactggcaaagactcatcaacaacaactggggattccgacccaagagactcaacttcaagctctttaacattcaagtcaaagaggtcacgcagaatgacggtacgacgacgattgccaataaccttaccagcacggttcaggtgtttactgactcggagtaccagctcccgtacgtcctcgggtcggcgcatcaaggatgcctcccgccgtttccagcggacgtcttcatggtcccacagtatggatacctcaccctgaacaacgggagtcaggcggtaggacgctcttccttttactgcctggagtactttccttctcagatgcttcgtactggaaacaactttcagttcagctacacctttgaagacgttcctttccacagcagctacgctcacagccagagtctggatcggctgatgaatcctctgatcgaccagtacctgtattatctgaacaaaacacaatcaaatagtggaactcttcagcagtctcggctactgtttagtcaagctggacccaccagcatgtctcttcaagctaaaaactggctacctggaccttgctacagacagcagcgtctgtcaaagcaggcaaacgacaacaacaacagcaactttccctggactgcggctacaaagtaccacctaaatggccgggactcgttggttaatccaggaccagctatggccagtcacaaagacgatgaagaaaagtttttccccatgcatggaaccctgatatttggtaaacaaggaacaaatgctaacgacgcggatttggacaatgtcatgattacagatgaagaagaaatccgcaccaccaatcccgtggctacggagcagtacggatatgtgtcaaataatttgcaaaactcaaatactggtccaactactggaactgtcaatcaccaaggagcgttacctggcatggtgtggcaggatcgagacgtgtacctgcagggacccatttgggccaagattcctcacaccgatggacactttcatccttctccactgatgggaggttttgggctcaaacacccgcctcctcagatcatgatcaaaaacactcccgttccagccaatcctcccacaaacttcagttctgccaagtttgcttctttcatcacacagtattccacggggcaggtcagcgtggagatcgagtgggagctgcagaaagagaacagcaaacgctggaatcccgaaattcagtacacttccaactacaacaaatctgttaatgtggactttactgtggacactaatggcgtgtattcagagcctcgccccattggcaccagatacctgactcgtaatctgtaa

SEQ ID NO: 4942 - DNA, 2217 bp, Adeno-associated virus
atggctgctgacggttatcttccagattggctcgaggacaacctctctgagggcattcgcgagtggtgggacctgaaacctggagcccccaagcccaaggccaaccagcagaagcaggacgacggccggggtctggtgcttcctggctacaagtacctcggacccttcaacggactcgacaagggggagcccgtcaacgcggcggacgcagcggccctcgagcacgacaaggcctacgaccagcagctcaaagcgggtgacaatccgtacctgcggtataaccacgccgacgccgagtttcaggagcgtctgcaagaagatacgtcttttgggggcaacctcgggcgagcagtcttccaggccaagaagcgggttctcgaacctctcggtctggttgaggaagctgctaagacggctcctggaaagaagagaccggtagaaccgtcacctcagcgttcccccgactcctccacgggcatcggcaagaaaggccagcagcccgctaaaaagagactgaactttggtcagactggcgactcagagtcagtccccgaccctcaaccaatcggagaaccacctgcaggcccctctggtctgggatctggtacaatggctgcaggcggtggcgctccaatggcagacaataacgaaggcgccgacggagtgggtagttcctcaggaaattggcattgcgattccacatggctgggcgacagagtcatcaccaccagcacccgaacctgggccctgcccacctacaacaaccacctctacaagcaaatatccaatgggacatcgggagggagcaccaacgacaacacctacttcggctacagcaccccctgggggtattttgacttcaacagattccactgccacttctcaccacgtgactggcagcgactcatcaacaacaactggggattccggccaaaaagactcagcttcaagctcttcaacatccaggtcaaggaggtcacgcagaatgaaggcaccaagaccatcgccaataaccttaccagcacgattcaggtatttacggactcggaataccagctgccgtacgtcctcggctccgcgcaccagggctgcctgcctccgttcccggcggacgtcttcatgattccccagtacggctaccttacactgaacaatggaagtcaagccgtaggccgttcctccttctactgcctggaatattttccatctcaaatgctgcgaactggaaacaattttgaattcagctacaccttcgaggacgtgcctttccacagcagctacgcacacagccagagcttggaccgactgatgaatcctctcatcgaccagtacctgtactacttatccagaactcagtccacaggaggaactcaaggtacccagcaattgttattttctcaagctgggcctgcaaacatgtcggctcaggctaagaactggctacctggaccttgctaccggcagcagcgagtctctacgacactgtcgcaaaacaacaacagcaactttgcttggactggtgccaccaaatatcacctgaacggaagagactctttggtaaatcccggtgtcgccatggcaacccacaaggacgacgaggaacgcttcttcccgtcgagtggagtcctgatgtttggaaaacagggtgctggaagagacaatgtggactacagcagcgttatgctaaccagcgaagaagaaattaaaaccactaaccctgtagccacagaacaatacggtgtggtggctgacaacttgcagcaaaccaatacagggcctattgtgggaaatgtcaacagccaaggagccttacctggcatggtctggcagaaccgagacgtgtacctgcagggtcccatctgggccaagattcctcacacggacggcaactgccacccttcaccgctaatgggaggatttggactgaagcacccacctcctcagatcctgatcaagaacacgccggtacctgcggatcctccaacaacgttcagccaggcgaaattggcttccttcattacgcagtacagcaccggacaggtcagcgtggaaatcgagtgggagctgcagaaggagaacagcaaacgctggaacccagagattcagtacacttcaaactactacaaatctacaaatgtggactttgctgtcaatacagagggaacttattctgagcctcgccccattggtactcgttacctcacccgtaatctgtaa

SEQ ID NO: 4943 - protein, 735 aa, Adeno-associated virus
MAADGYLPDWLEDTLSEGTRQWWKLKPGPPPPKPAERHKDDSRGLVLPGYKYLGPFNGLDKGEPVNEADAAALEHDKAYDRQLDSGDNPYLKYNHADAEFQERLKEDTSFGGNLGRAVFQAKKRVLEPLGLVEEPVKTAPGKKRPVEHSPAEPDSSSGTGKAGQQPARKRLNFGQTGDADSVPDPQPLGQPPAAPSGLGSTTMATGSGAPMADNNEGADGVGNSSGNWHCDSQWLGDRVITTSTRTWALPTYNNHLYKQISSQSGASNDNHYFGYSTPWGYFDFNRFHCHFSPRDWQRLINNNWGFRPKRLNFKLFNIQVKEVTQNDGTTTIANNLTSTVQVFTDSEYQLPYVLGSAHQGCLPPFPADVFMVPQYGYLTLNNGSQAVGRSSFYCLEYFPSQMLRTGNNFQFSYTFEDVPFHSSYAHSQSLDRLMNPLIDQYLYYLNKTQSNSGTLQQSRLLFSQAGPTSMSLQAKNWLPGPCYRQQRLSKQANDNNNSNFPWTAATKYHLNGRDSLVNPGPAMASHKDDEEKFFPMHGTLIFGKQGTNANDADLDNVMITDEEEIRTTNPVATEQYGYVSNNLQNSNTGPTTGTVNHQGALPGMVWQDRDVYLQGPIWAKIPHTDGHFHPSPLMGGFGLKHPPPQIMIKNTPVPANPPTNFSSAKFASFITQYSTGQVSVEIEWELQKENSKRWNPEIQYTSNYNKSVNVDFTVDTNGVYSEPRPIGTRYLTRNL

SEQ ID NO: 4944 - DNA, 2208 bp, Adeno-associated virus
atggctgccgatggttatcttccagattggctcgaggacactctctctgaaggaataagacagtggtggaagctcaaacctggcccaccaccaccaaagcccgcagagcggcatcaggacaacagcaggggtcttgtgcttcctgggtacaagtacctcggaccctccaacggactcgacaaaggagagccggtcaacgaggcagacgccgcggccctcgagcacgacaaggcctacgaccggcagctcgacagcggagacaacccgtacctcaagtacaaccacgccgacgcggagtttcaggagcgtcttaaagaagatacgtcttttgggggcaacctcggacgagcagtcttccaggcgaaaaagagggttcttgaacctctgggcctggttgaggaacctgttaagacggctccgggaaaaaagaggccggtagagcactctcctgtggagccagactcctcctcgggaaccggaaaagcgggccatcagcctgcgagaaagagattgaattttggtcagactggagacgcagactccgtacctgacccccagcctctcggacagccaccagcagcccccacaagtttgggatctactacaatggctacaggcagtggcgcaccaatggcagacaataacgagggtgccgatggagtgggtaattcctcaggaaattggcattgcgattcccaatggctgggcgacagagtcatcaccaccagcacccgaacctgggccctgcccacctacaacaaccacctctacaagcaaatctccagccaatcaggagcctcgaacgacaaccactactttggctgcagcaccccctgggggtattttgacttcaacagattccactgtcacttctccccacgtgattggcaaagactcatcaacaacaactggggattccgacccaagagactcaacttcaagctctttaacattcaagtcaaagaggtcacgcagaatgacggtacgacgacgattgccaataaccttaccagcacggttcaggtgtttactgactcggagtacccgctcccgtacgtcctcggctcggcgcatcaaggatgcctcccgccgtttccagcggacgtcttcatggtcccacagtatggatacctcaccctgaacaacgggagtcaggcggtaggacgctcttccttttactgcctggagtactttccttctcagatgctgcgtaccggaaacaactttaccttcagctacacctttgaggacgttcctttccacagcagctacgctcacagccagagtttggaccggctgatgaatcctctgatcgaccagtatctatattatctgaacaggacacaatcaaatagtggaactcttcagcagtctaggctactgtttagccaagctggacccaccagcatgtctcttcaagctaaaaactggctgcctggaccttgctacagacagcagcgtctttcaaagcaggcaaacgacaacaacaacagcaactttccctggactgcggctacaaagtatcatctaaatggccgggactcgttggttaatccaggaccagctatggccagccacaaagacgatgaagaaaagtttttccccatgcatggaaccctgatatttggtaaacaaggaacaaatgctaacgacgcggatttggagcatgttatgattacagatgaagaagaaatcaggaccaccaatcctgtggctacagagcagtacggaaacgtgtcaaataatttgcaaaactcaaatactggtccaactacagaaaatgtcaatcaccagggagcgttacctggtatggtgtggcaggatcgagacgtgtacctgcagggacccatttgggccaagattcctcacaccgacggacactttcacccttctccactgatgggaggttttggactcaaacacccgcctcctcaaatcatgatcaaaaacactcccgttccagccaatcctcccacaaacttcagttctgccaagtttgcttctttcatcacacagtattccacgggccaggtcagcgtggagattgagtgggagctgcagaaggagaacagcaaacgctggaaccccgagatccagtatacttccaactacaacaaatctgttaatgtggactttactgtggacactaatggtgtgtattcagagccttgccccattggcaccagatacctgactcgtaatctgtaa

SEQ ID NO: 4945 - protein, 735 aa, Adeno-associated virus
MAADGYLPDWLEDTLSEGIRQWWKLKPGPPPPKPAERHQDNSRGLVLPGYKYLGPSNGLDKGEPVNEADAAALEHDKAYDRQLDSGDNPYLKYNHADAEFQERLKEDTSFGGNLGRAVFQAKKRVLEPLGLVEEPVKTAPGKKRPVEHSPVEPDSSSGTGKAGHQPARKRLNFGQTGDADSVPDPQPLGQPPAAPTSLGSTTMATGSGAPMADNNEGADGVGNSSGNWHCDSQWLGDRVITTSTRTWALPTYNNHLYKQISSQSGASNDNHYFGCSTPWGYFDFNRFHCHFSPRDWQRLINNNWGFRPKRLNFKLFNIQVKEVTQNDGTTTIANNLTSTVQVFTDSEYPLPYVLGSAHQGCLPPFPADVFMVPQYGYLTLNNGSQAVGRSSFYCLEYFPSQMLRTGNNFTFSYTFEDVPFHSSYAHSQSLDRLMNPLIDQYLYYLNRTQSNSGTLQQSRLLFSQAGPTSMSLQAKNWLPGPCYRQQRLSKQANDNNNSNFPWTAATKYHLNGRDSLVNPGPAMASHKDDEEKFFPMHGTLIFGKQGTNANDADLEHVMITDEEEIRTTNPVATEQYGNVSNNLQNSNTGPTTENVNHQGALPGMVWQDRDVYLQGPIWAKIPHTDGHFHPSPLMGGFGLKHPPPQIMIKNTPVPANPPTNFSSAKFASFITQYSTGQVSVEIEWELQKENSKRWNPEIQYTSNYNKSVNVDFTVDTNGVYSEPCPIGTRYLTRNL

SEQ ID NO: 4946 - DNA, 2196 bp, Adeno-associated virus
atggctgctgacggttatcttccagattggctcgaggacaacctctctgagggcattcgcgagtggtgggcgctgaaacctggagccccgcaacccaaagccaaccagcaaaagcaggacgacggccggggtctggtgcttcctggctacaagtacctcggacccttcaacggactcgacaagggggagcccgtcaacgaggcggacgccgcggccctcgagcacgacaaggcctacgaccagcagctcaaagcgggtgacaatccgtacctgcggtataatcacgccgacgccgagtttcaagagcgtctgcaagaagatacgtcctttgggggcaacctcgggcgagcagtcttccaggccaaaaagagggtactcgagcctctgggtctggttgaggaaggcgctaagacggctcctggaaagaagcggccagtagaaccggactccagctcgggcatcggcaagtcaggccagcagcccgcgaaaaagagactgaattttgggcagactggcgactcagagtcagtgcctgacccccaacctctctcagaaccacccgcaggtccctctggtctgggatctggtacaatggctgctggcggtggcgctccaatggcagacaataacgaaggcgccgacggagtgggtaatgtctcaggaaattggcattgcgattccacatggctgggcgaccgagtcatcaccaccagcactcggacctgggccctccccacctacaacaaccacctctacaagcaaatctccaacgggacctcgggaggcagcagcaacgacaacacctactttggctacagcaccccctgggggtattttgactttaacagattccactgccacttttcaccacgtgactggcagcgactcatcaacaacaactgggggttccggcccaagaagctcaacttcaagctcttcaacatccaggtcaaggaggtcacccagaatgaaggcaccaagaccatcgccaataacctcaccagcacggtgcaggtctttacggactcggagtaccagctcccgtacgtgctcggctctgcccaccagggctgcctgcctccgttcccggcggacgtgttcatgattccgcagtacgggtacctgacgctgaacaacgggagccaggccgtggggcgatcctccttctactgcctggagtactttccctcgcagatgctgagaacgggcaacaactttaccttcagctacaccttcgaggacgtgcccttccacagcagctacgcgcacagccagagcctggaccggctgatgaacccgctgattgaccagtacctgtactacctgtctcggactcagaccaacgggaccaatgccacgcagactctgttgtttgctcaggccgggcctcagaacatgtcggctcaggccaagaactggctgcctggtccttgctatcggcagcagcgcgtctctacgacagtgtcgcaaaacaacaacagcaactttacctggaccggggcgaccaagtaccacctgaacggccgagactccctggtgagccccggtgtcgccatggcaacgcacaaggacgacgaggagcgcttcttcccgagcagcggggtcctgatgtttggcaagcagggcgctggaaaggacaatgtcgagtacaccaacgtgatgctcaccagcgaggaggagatcaagaccaccaaccctgtggccacggagcagtacggcgtggtggctgacaatctgcagcagaccaactcagctcccattgtgggggcagtcaacagccagggggccttacccggtatggtctggcagaaccgggacgtgtacctgcagggtcccatctgggccaagatcccgcatacggacggcaactttcacccgtctcctctcatgggcggctttggactgaaacacccgcctccccagatcctgatcaaaaacacgccggtacctgcggatcccccggtgaactttacggacgctaagctggcgagtttcatcacgcagtacagcaccgggcaggtcagcgtggagattgagtgggagctgcagaaggagaacagcaagcgctggaatcccgagattcagtacacttccaattattataaatcagctaatgtggactttgccgtcaatgcagatggtgtatatagtgaaccccgccccattggcactcgttacctcacccgtaatctgtaa

SEQ ID NO: 4947 - protein, 731 aa, Adeno-associated virus
MAADGYLPDWLEDNLSEGIREWWALKPGAPQPKANQQKQDDGRGLVLPGYKYLGPFNGLDKGEPVNEADAAALEHDKAYDQQLKAGDNPYLRYNHADAEFQERLQEDTSFGGNLGRAVFQAKKRVLEPLGLVEEGAKTAPGKKRPVEPDSSSGIGKSGQQPAKKRLNFGQTGDSESVPDPQPLSEPPAGPSGLGSGTMAAGGGAPMADNNEGADGVGNVSGNWHCDSTWLGDRVITTSTRTWALPTYNNHLYKQISNGTSGGSSNDNTYFGYSTPWGYFDFNRFHCHFSPRDWQRLINNNWGFRPKKLNFKLFNIQVKEVTQNEGTKTIANNLTSTVQVFTDSEYQLPYVLGSAHQGCLPPFPADVFMIPQYGYLTLNNGSQAVGRSSFYCLEYFPSQMLRTGNNFTFSYTFEDVPFHSSYAHSQSLDRLMNPLIDQYLYYLSRTQTNGTNATQTLLFAQAGPQNMSAQAKNWLPGPCYRQQRVSTTVSQNNNSNFTWTGATKYHLNGRDSLVSPGVAMATHKDDEERFFPSSGVLMFGKQGAGKDNVEYTNVMLTSEEEIKTTNPVATEQYGVVADNLQQTNSAPIVGAVNSQGALPGMVWQNRDVYLQGPIWAKIPHTDGNFHPSPLMGGFGLKHPPPQILIKNTPVPADPPVNFTDAKLASFITQYSTGQVSVEIEWELQKENSKRWNPEIQYTSNYYKSANVDFAVNADGVYSEPRPIGTRYLTRNL

SEQ ID NO: 4948 - DNA, 2196 bp, Adeno-associated virus
atggctgctgacggttatcttccagattggctcgaggacaacctctctgagggcattcgcgagtggtgggcgctgaaacctggagccccgcaacccaaagccaaccagcaaaagcaggacgacggccggggtctggtgcttcctggctacaagtacctcggacccttcaacggactcgacaagggggagcccgtcaacgaggcggacgccgcggccctcgagcacgacaaggcctacgaccagcagctcaaagcgggtgacaatccgtacctgcggtataatcacgccgacgccgagtttcaagagcgtctgcaagaagatacgtcctttgggggcaacctcgggcgagcagtcttccaggccaaaaagagggtactcgagcctctgggtctggttgaggaaggcgctaagacggctcctggaaagaagcggccagtagaaccggactccagctcgggcatcggcaagtcaggccggcagcccgcgaaaaagagactgaattttgggcagactggcgactcagagtcagtgcctgacccccaacctctctcagaaccacccgcaggtccctctggtctgggatctggtacaatggctgcaggcggtggcgctccaatggcagacaataacgaaggcgccgacggagtgggtaatgcctcaggaaattggcattgcgattccacatggctgggcgaccgagtcatcaccaccagcactcggacctgggccctccccacctacaacaaccacctctacaagcaaatctccaacgggacctcgggaggcagcagcaacgacaacacctactttggctacagcaccccctgggggtattttgactttaacagattccactgccacttttcaccacgtgactggcagcgactcatcaacaacaactggggattccggcccaagaggctcaacttcaagctcttcaacatccaggtcaaggaggtcacccagaatgaaggcaccaagaccatcgccaataacctcaccagcacggtgcaggtctttacggactcgaagtaccagctcccgtacgtgctcggctctgcccaccagggctgcctgcctccgttcccggcggacgtgttcatgattccgcagtacgggtacctgacgctgaacaacgggagccaggccgtggggcgatcctccttctactgcctggagtactttccctcgcagatgctgagaacgggcaacaactttaccttcagctacaccttcgaggacgtgcccttccacagcagctacgcgcacagccagagcctggaccggctgatgaacccgctgattgaccagtacctgtactacctgtctcggactcagaccaacgggaccaatgccacgcagactctgttgtttgctcaggccgggcctcagaacatgtcggctcaggccaagaactggctgcctggtccttgctatcggcagcagcgcgtctctacgacagtgtcgcaaaacaacaacagcaactttacctggaccggggcgaccaagtaccacctgaacggccgagactccctggtgaaccccggtgtcgccatggcaacgcacaaggacgacgaggagcgcttcttcccgagcagcggggtcctgatgtttggcaagcagggcgctggaaaggacaatgtcgagtacaccaacgtgatgctcaccagcgaggaggagatcaagaccaccaaccctgtggccacggagcagtacggtgtggtggctgacaatctgcagcagaccaactcggctcccattgtgggggcagtcaacagccagggggccttacccggtatggtctggcagaaccgggacgtgtacctgcagggtcccatctgggccaagatcccgcatacggacggcaactttcacccgtctcctctcatgggcggctttggactgaaacacccgcctccccagatcctgatcaaaaacacgccggtacctgcggatcccccggtgaactttacggacgctaagctggcgagtttcatcacgcagtacagcaccgggcaggtcagcgtggagattgagtgggagctgcagaaggagaacagcaagcgctggaatcccgagattcagtacacttccaattattataaatcagctaatgtggactttgccgtcaatgcagatggtgtatatagtgaaccccgccccattggcactcgttacctcacccgtaatctgtaa

SEQ ID NO: 4949 - protein, 731 aa, Adeno-associated virus
MAADGYLPDWLEDNLSEGIREWWALKPGAPQPKANQQKQDDGRGLVLPGYKYLGPFNGLDKGEPVNEADAAALEHDKAYDQQLKAGDNPYLRYNHADAEFQERLQEDTSFGGNLGRAVFQAKKRVLEPLGLVEEGAKTAPGKKRPVEPDSSSGIGKSGRQPAKKRLNFGQTGDSESVPDPQPLSEPPAGPSGLGSGTMAAGGGAPMADNNEGADGVGNASGNWHCDSTWLGDRVITTSTRTWALPTYNNHLYKQISNGTSGGSSNDNTYFGYSTPWGYFDFNRFHCHFSPRDWQRLINNNWGFRPKRLNFKLFNIQVKEVTQNEGTKTIANNLTSTVQVFTDSKYQLPYVLGSAHQGCLPPFPADVFMIPQYGYLTLNNGSQAVGRSSFYCLEYFPSQMLRTGNNFTFSYTFEDVPFHSSYAHSQSLDRLMNPLIDQYLYYLSRTQTNGTNATQTLLFAQAGPQNMSAQAKNWLPGPCYRQQRVSTTVSQNNNSNFTWTGATKYHLNGRDSLVNPGVAMATHKDDEERFFPSSGVLMFGKQGAGKDNVEYTNVMLTSEEEIKTTNPVATEQYGVVADNLQQTNSAPIVGAVNSQGALPGMVWQNRDVYLQGPIWAKIPHTDGNFHPSPLMGGFGLKHPPPQILIKNTPVPADPPVNFTDAKLASFITQYSTGQVSVEIEWELQKENSKRWNPEIQYTSNYYKSANVDFAVNADGVYSEPRPIGTRYLTRNL

SEQ ID NO: 4950 - DNA, 2196 bp, Adeno-associated virus
atggctgctgacggttatcttccagattggctcgaggacaacctctctgagggcattcgcgagtggtgggcgctgaaacctggagccccgcaacccaaagccaaccagcaaaagcaggacgacggccggggtctggtgcttcctggctacaagtacctcggacccttcaacggactcgacaagggggagcccgtcaacgaggcggacgccgcggccctcgagcacgacaaggcctacgaccagcagctcaaagcgggtgacaatccgtacctgcggtataatcacgccgacgccgagtttcaagagcgtctgcaagaagatacgtcctttgggggcaacctcgggcgagcagtcttccaggccaaaaagagggtactcgagcctctgggtctggttgaggaaggcgctaagacggctcctggaaagaagcggccagtagaaccggactccagctcgggcatcggcaagtcaggccagcagcccgcgaaaaagagactgaattttgggccgactggcgactcagagtcagtgcctgacccccaacctctctcagaaccacctgcaggtccctctggtctgggatctggtacaatggctgcaggcggtggcgctccaatggcagacaataacgaaggcgccgacggagtgggtaatgtctcaggaaattggcattgcgattccacatggctgggcgaccgagtcatcaccaccagcactcggacctgggccctccccacctacaacaaccacctctacaagcaaatctccaacgggacctcgggaggcagcagcaacgacaacacctactttggctacagcaccccctgggggtattttgactttaacagattccactgccacttttcaccacgcgactggcagcgactcatcaacaacaactggggattccggcccaagaagctcaacttcaagctcttcaacatccaggtcaaggaggtcacccagaatgaaggcaccaagaccaccgccaataacctcaccagcacggtgcaggtctttacggactcggagtaccagctcccgtacgtgctcggctctgcccaccagggctgcctgcctccgttcccggcggacgtgttcatgattccgcagtacgggtacctgacgctgaacaacgggagccaggccgtggggcgatcctccttctactgcctggagtactttccctcgcagatgctgagaacgggcaacaactttaccttcagctacaccttcgaggacgtgcccttccacagcagctacgcgcacagccagagcctggaccggctgatgaacccgctgattgaccagtacctgtactacctgtctcggactcagaccaacgggaccaatgccacgcagactctgttgtttgctcaggccgggcctcagaacatgtcggctcaggccaagaactggctgcctggtccttgctatcggcagcagcgcgtctctacggcagtgtcgcaaaacaacaacagcaactttacctggaccggggcgaccaagtaccacctgaacggccgagactccctggtgaaccccggtgtcgccatggcaacgcacaaggacgacgaggagcgcttcttcccgagcagcggggtcctgatgtttggcaagcagggcgctggaaaggacaatgtcgagtacaccaacgtgatgctcaccagcgaggaggagatcaagaccaccaaccctgtggccacggagcagtacggtgtggtggctgacaatctgcagcagaccaactcggctcccattgtgggggcagtcaacagccagggggccttacccggtatggtctggcagaaccgggacgtgtacctgcagggtcccatctgggccaagatcccgcatacggacggcaactttcacccgtctcctctcatgggcggctttggactgaaacacccgcctccccagatcctgatcaaaaacacgccggtacctgcggatcccccggtgaactttacggacgctaagctggcgagtttcatcacgcagtacagcaccgggcaggtcagcgtggagattgagtgggagctgcagaaggagaacagcaagcgctggaatcccgagattcagtacacttccaattattataaatcagctaatgtggactttgccgtcaatgcagatggtgtatatagcgaaccccgccccattggcactcgttacctcacccgtaatctgtaa

SEQ ID NO: 4951 - protein, 731 aa, Adeno-associated virus
MAADGYLPDWLEDNLSEGIREWWALKPGAPQPKANQQKQDDGRGLVLPGYKYLGPFNGLDKGEPVNEADAAALEHDKAYDQQLKAGDNPYLRYNHADAEFQERLQEDTSFGGNLGRAVFQAKKRVLEPLGLVEEGAKTAPGKKRPVEPDSSSGIGKSGQQPAKKRLNFGPTGDSESVPDPQPLSEPPAGPSGLGSGTMAAGGGAPMADNNEGADGVGNVSGNWHCDSTWLGDRVITTSTRTWALPTYNNHLYKQISNGTSGGSSNDNTYFGYSTPWGYFDFNRFHCHFSPRDWQRLINNNWGFRPKKLNFKLFNIQVKEVTQNEGTKTTANNLTSTVQVFTDSEYQLPYVLGSAHQGCLPPFPADVFMIPQYGYLTLNNGSQAVGRSSFYCLEYFPSQMLRTGNNFTFSYTFEDVPFHSSYAHSQSLDRLMNPLIDQYLYYLSRTQTNGTNATQTLLFAQAGPQNMSAQAKNWLPGPCYRQQRVSTAVSQNNNSNFTWTGATKYHLNGRDSLVNPGVAMATHKDDEERFFPSSGVLMFGKQGAGKDNVEYTNVMLTSEEEIKTTNPVATEQYGVVADNLQQTNSAPIVGAVNSQGALPGMVWQNRDVYLQGPIWAKIPHTDGNFHPSPLMGGFGLKHPPPQILIKNTPVPADPPVNFTDAKLASFITQYSTGQVSVEIEWELQKENSKRWNPEIQYTSNYYKSANVDFAVNADGVYSEPRPIGTRYLTRNL

SEQ ID NO: 4952 - DNA, 4404 bp, Adeno-associated virus
atggctgccgatggttatcttccagattggctcgagggcaacctctctgagggcattcgcgagtggtgggacttgaaacctggagccccgaaacccaaagccaaccagcaaaagcaggacgacggccggggtctggtgcttcctggctacaggtacctcggacccttcaacggactcgacaagggagagccggtcaacgaggcagacgccgcggccctcgagcacgacaaggcctacgacaagcagctcgagcagggggacaacccgtacctcaagtacaaccacgccgacgccgagtttcaggagcgtcttcaagaagatacgtcttttgggggcaacctcgggcgagcagtcttccaggccaagaagcgggttctcgaacctctcggtctggttgaggaaggcgctaagacggctcctggaaagaagagacccatagaatcccccgactcctccacgggcatcggcaagaacggccagccgcccgctaaaaagaagctcaactttgggcagactggcgactcagagtcagtgcccgacccccaacctctcggagaacctcccgccgcgccctcaggtctgggatctggtacaatggctgcaggcggtggcgcaccaatggcagacaataacgaaggcgccgacggagtgggtaatgcctccggaaattggcattgcgattccacatggctgggcgacagagtcatcaccaccagcacccgcacctgggccctgcccacctacaacaaccacctctacaagcagatatcaagtcagagcggggctaccaacgacaaccacttcttcggctacagcaccccctggggctattttgacttcaacagattccactgccacttctcaccacgtgactggcagcgactcatcaacaacaactggggattccggcccagaaagctgcggttcaagttgttcaacatccaggtcaaggaggtcacgacgaacgacggcgttacgaccatcgctaataaccttaccagcacgattcaggtcttctcggactcggagtaccaactgccgtacgtcctcggctctgcgcaccagggctgcctccctccgttccctgcggacgtgttcatgattcctcagtacggatatctgactctaaacaacggcagtcagtctgtgggacgttcctccttctactgcctggagtactttccttctcagatgctgagaacgggcgataactttgaattcagctacacctttgaggaagtgcctttccacagcagctatgcgcacagccagagcctggaccggctgatgaatcccctcatcgaccagtacctgtactacctggcccggacccagagcactacggggtccacaagggagctgcagttccatcaggctgggcccaacaccatggccgagcaatcaaagaactggctgcccggaccctgttatcggcagcagagactgtcaaaaaacatagacagcaacaacaacagtaactttgcctggaccggggccactaaataccatctgaatggtagaaattcattaaccaacccgggcgtagccatggccaccaacaaggacgacgaggaccagttctttcccatcaacggagtgctggtttttggcaaaacgggggctgccaacaagacaacgctggaaaacgtgctaatgaccagcgaggaggagatcaaaaccaccaatcccgtggctacagaagaatacggtgtggtctccagcaacctgcaatcgtctacggccggaccccagacacagactgtcaacagccagggggctctgcccggcatggtctggcagaaccgggacgtgtacctgcagggtcccatctgggccaaaattcctcacacggacggcaactttcacccgtctcccctgatgggcggatttggactcaaacacccgcctcctcaaattctcatcaaaaacaccccggtacctgctaatcctccagaggtgtttactcctgccaagtttgcctcatttatcacgcagtacagcaccggccaggtcagcgtggagatcgagtgggaactgcagaaagaaaacagcaaacgctggaatccagagattcagtacacctcaaattatgccaagtctaataatgtggaatttgctgtcaacaacgaaggggtttatactgagcctcgccccattggcacccgttacctcacccgtaacctgtaaatggctgccgatggttatcttccagattggctcgaggacaacctctctgagggcattcgcgagtggtgggacttgaaacctggagccccgaaacccaaagccaaccagcaaaagcaggacgacggccggggtctggtgcttcctggctacaagtacctcggacccttcaacggactcgacaagggggagcccgtcaacgcggcggacgcagcggccctcgagcacgacaaggcctacgaccagcagctcaaagcgggtgacaatccgtacctgcggtataaccacgccgacgccgagtttcaggagcgtctgcaagaagatacgtcttttgggggcaacctcgggcgagcagtcttccaggccaagaagcgggttctcgaacctctcggtctggttgaggaaggcgctaagacggctcctggaaagaagagaccggtagagccatcaccccagcgttctccagactcctctacgggcatcggcaagaaaggccagcagcccgcgaaaaagagactcaactttgggcagactggcgactcagagtcagtgcccgaccctcaaccaatcggagaaccccccgcaggcccctctggtctgggatctggtacaatggctgcaggcggtggcgctccaatggcagacaataacgaaggcgccgacggagtgggtagttcctcaggaaattggcattgcgattccacatggctgggcgacagagtcatcaccaccagcacccgaacctgggccctccccacctacaacaaccacctctacaagcaaatctccaacgggacttcgggaggaagcaccaacgacaacacctacttcggctacagcaccccctgggggtattttgactttaacagattccactgccacttctcaccacgtgactggcagcgactcatcaacaacaactggggattccggcccaagagactcaacttcaagctcttcaacatccaggtcaaggaggtcacgcagaatgaaggcaccaagaccatcgccaataaccttaccagcacgattcaggtctttacggactcggaataccagctcccgtacgtcctcggctctgcgcaccagggctgcctgcctccgttcccggcggacgtcttcatgattcctcagtacgggtacctgactctgaacaatggcagtcaggccgtgggccgttcctccttctactgcctggagtactttccttctcaaatgctgagaacgggcaacaactttgagttcagctaccagtttgaggacgtgccttttcacagcagctacgcgcacagccaaagcctggaccggctgatgaaccccctcatcgaccagtacctgtactacctgtctcggactcagtccacgggaggtaccgcaggaactcagcagttgctattttctcaggccgggcctaataacatgtcggctcaggccaaaaactggctacccgggccctgctaccggcagcaacgcgtctccacgacactgtcgcaaaataacaacagcaactttgcctggaccggtgccaccaagtatcatctgaatggcagagactctctggtaaatcccggtgtcgctatggcaacccacaaggacgacgaagagcgattttttccgtccagcggagtcttaatgtttgggaaacagggagctggaaaagacaacgtggactatagcagcgttatgctaaccagtgaggaagaaattaaaaccaccaacccagtggccacagaacagtacggcgtggtggccgataacctgcaacagcaaaacgccgctcctattgtaggggccgtcaacagtcaaggagccttacctggcatggtctggcagaaccgggacgtgtacctgcagggtcctatctgggccaagattcctcacacggacggaaactttcatccctcgccgctgatgggaggctttggactgaaacacccgcctcctcagatcctgattaagaatacacctgttcccgcggatcctccaactaccttcagtcaagctaagctggcgtcgttcatcacgcagtacagcaccggacaggtcagcgtggaaattgaatgggagctgcagaaagaaaacagcaaacgctggaacccagagattcaatacacttccaactactacaaatctacaaatgtggactttgctgttaacacagatggcacttattctgagcctcgccccatcggcacccgttacctcacccgtaatctgtaa

SEQ ID NO: 4953 - protein, 738 aa, Adeno-associated virus; identical to SEQ ID NO: 4756

SEQ ID NO: 4954 - protein, 738 aa, Adeno-associated virus; identical to SEQ ID NO: 4756

SEQ ID NO: 4955 - DNA, 2501 bp, Adeno-associated virus
gaattcgcccttggctgcgtcaactggaccaatgagaactttcccttcaacgattgcgtcgacaagatggtgatctggtgggaggagggcaagatgacggccaaggtcgtggagtccgccaaggccattcatcatctgctggggcgggctcccgagattgcttgctcggcctgcgatctggtcaacgtggacctggatgactgtgtttctgagcaataaatgacttaaaccaggtatggctgccgatggttatcttccagattggctcgaggacaacctctctgagggcattcgcgagtggtgggacttgagacctggagccccgaaacccaaagccaaccagcaaaagcaggacgacggccggggtctggtgcttcctggctacaagtacctcggacccttcaacggactcgacaagggagagccggtcaacgaggcagacgccgcggccctcgagcacgacaaggcctacgacaagcagctcgagcagggggacaacccgtacctcaagtacaaccacgccgacgccgagtttcaggagcgtcttcaagaagatacgtcttttgggggcaacctcgggcgagcagtcttccaggccaagaagcgggttctcgaacctctcggtctggttgaggaaggcgctaagacggctcctggaaagaagagacccatagaatcccccgactcctccacgggcatcggcaagaaaggccagcagcccgctaaaaagagactcaactttgggcagactggcgactcagagtcagtgcccgaccctcaaccaatcggagaaccccccgcaggcccctctggtctgggatctggcacaatggctgcaggcggtggcgctccaatggcagacaataacgaaggcgccgacggagtgggtagttcctcaggaaattggcattgcgattccacatggctgggcgacagagtcatcaccaccagcacccgaacctgggccctccccacctacaacaaccacctctacaagcaaatctccaacgggacatcgggaggaagcaccaacgacaacacctacttcggctacagcaccccctgggggtattttgactttaacagattccactgccacttctcaccacgtgactggcagcgactcatcaacaacaactggggattccggcccaagagactcaacttcaagctcttcaacatccaggtcaaggaggtcacgcagaatgaaggcaccaagaccatcgccaataaccttaccagcacgattcaggtctttacggactcggaataccagctcccgtacgtcctcggctctgcgcaccagggctgcctgcctccgttcccggcggacgtcttcatgattcctcagtacgggtacctgactctgaacaacggcagtcaggccgtgggccgttcctccttctactgcctggagtactttccttctcaaatgctgagaacgggcaacaactttgagttcagctaccagtttgaggacgtgccttttcacagcagctatgcgcacagccaaagcctggaccggctgatgaaccccctcatcgaccagtacctgtactacctgtctcggactcagtccacgggaggtaccgcaggaactcagcagttgctattttctcaggccgggcctaataacatgtcggctcaggccaaaaactggctacccgggccctgctaccggcagcaacgcgtctccacgacagtgtcgcaaaataacaacagcaactttgcttggaccggtgccaccaagtatcatctgaatggcagagactctctggtaaatcccggtgtcgctatggcaacgcacaagggcgacgaagagcgattttttccatccagcggagtcttgatgtttgggaaacagggagctggaaaagacaacgtagactatagcagcgttatgctaaccagtgaggaagaaatcaaaaccaccaacccagtggccacagaacagtacggcgtggtggccgataacctgcaacagcaaaacgccgctcctattgtaggggccgtcaacagtcaaggagccttacctggcatggtctggcagaaccgggacgtgtacctgcagggtcctatctgggccaagattcctcacacggacggcaactttcatccttcgccgctgatgggaggctttggactgaaacacccgcctcctcagatcctgattaagaatacacctgttcccgcggatcctccaactaccttcagtcaagccaagctggcgtcgttcatcacgcagtacagcaccggacaggtcagcgtggaaattgaatgggagctgcagaaagagaacagcaagcgctggaacccagagattcagtatacttccaactactacaaatctacaaatgtggactttgctgtcaatactgagggtacttattcagagcctcgccccattggcacccgttacctcacccgtaacctgtaattgcctgttaatcaataaaccggttgattcgtttcagttgaactttggtctcaagggcgaattc

SEQ ID NO: 4956 - DNA, 2187 bp, Adeno-associated virus
atggctgccgatggttatcttccagattggctcgaggacaacctctctgagggcattcgcgagtggtgggacttgaaacctggagccccgaaacccaaagccaaccagcaaaagcaggacgacggccggggtctggtgcttcctggctacaagtacctcggacccttcaacggactcgacaagggagagccggtcaacgaggcagacgccgcggccctcgagcacgacaaggcctacgacaagcagctcgagcagggggacaacccgtacctcaagtacaaccacgccgacgccgagtttcaggagcgtcttcaagaagatacgtcttttgggggcaacctcgggcgagcagtcttccaggccaagaagcgggttctcgaacctctcggtctggttgaggaaggcgctaagacggctcctggaaagaagagacccatagaatcccccgactcctccacgggcatcggcaagaaaggccagcagcccgctaaaaagaagctcaactttgggcagactggcgactcagagtcagtgcccgacccccaacctctcggagaacctcccgccgcgccctcaggtctgggatctggtacaatggctgcaggcggtggcgcaccaatggcagacaataacgaaggcgccgacggagtgggtaatgcctccggaaattggcattgcgattccacatggctgggcgacagagtcatcaccaccagcacccgcacctgggccctgcccacctacaacaaccacctctacaagcagatatcaagtcagagcggggctaccaacgacaaccacttcttcggctacagcaccccctggggctattttgacttcaacagattccactgccacttctcaccacgtgactggcagcgactcatcaacaacaactggggattccggcccagaaagctgcggttcaagttgttcaacatccaggtcaaggaggtcacgacgaacgacggcgttacgaccatcgctaataaccttaccagcacgattcaggtcttctcggactcggagtaccaactgccgtacgtcctcggctctgcgcaccagggctgcctccctccgttccctgcggacgtgttcatgattcctcagtacggatatctgactctaaacaacggcagtcagtctgtgggacgttcctccttctactgcctggagtactttccttctcagatgctgagaacgggcaataactttgaattcagctacacctttgaggaagtgcctttccacagcagctatgcgcacagccagagcctggaccggctgatgaatcccctcatcgaccagtacctgtactacctggcccggacccagagcactacggggtccacaagggagctgcagttccatcaggctgggcccaacaccatggccgagcaatcaaagaactggctgcccggaccctgttatcggcagcagagactgtcaaaaaacatagacagcaacaacaacagtaactttgcctggaccggggccactaaataccatctgaatggtagaaattcattaaccaacccgggcgtagccatggccaccaacaaggacgacgaggaccagttctttcccatcaacggagtgctggtttttggcgaaacgggggctgccaacaagacaacgctggaaaacgtgctaatgaccagcgaggaggagatcaaaaccaccaatcccgtggctacagaagaatacggtgtggtctccagcaacctgcaatcgtctacggccggaccccagacacagactgtcaacagccagggggctctgcccggcatggtctggcagaaccgggacgtgtacctgcagggtcccatctgggccaaaattcctcacacggacggcaactttcacccgtctcccctgatgggcggatttggactcaaacacccgcctcctcaaattctcatcaaaaacaccccggtacctgctaatcctccagaggtgtttactcctgccaagtttgcctcatttatcacgcagtacagcaccggccaggtcagcgtggagatcgagtgggaactgcagaaagaaaacagcaaacgctggaatccagagattcagtacacctcaaattatgccaagtctaataatgtggaatttgctgtcaacaacgaaggggtttatactgagcctcgccccattggcacccgttacctcacccgtaacctgtaa

SEQ ID NO: 4957 - protein, 728 aa, Adeno-associated virus; identical to SEQ ID NO: 4728

SEQ ID NO: 4958 - protein, 728 aa, Adeno-associated virus; identical to SEQ ID NO: 4792

SEQ ID NO: 4959 - protein, 728 aa, Adeno-associated virus; identical to SEQ ID NO: 4792

SEQ ID NO: 4960 - DNA, 3113 bp, Adeno-associated virus
gaattcgccctttctacggctgcgtcaactggaccaatgagaactttcccttcaacgattgcgtcgacaagatggtgatctggtgggaggagggcaagatgacggccaaggtcgtggagtccgccaaggccattctcggcggcagcaaggtgcgcgtggaccaaaagtgcaagtcgtccgcccagatcgatcccacccccgtgatcgtcacttccaacaccaacatgtgcgccgtgattgacgggaacagcaccaccttcgagcaccagcagccgttacaagaccggatgttcaaatttgaactcacccgccgtctggagcatgactttggcaaggtgacaaagcaggaagtcaaagagttcttccgctgggcgcaggatcacgtgaccgaggtggcgcatgagttctacgtcagaaagggtggagccaacaagagacccgcccccgatgacgcggataaaagcgagcccaagcgggcctgcccctcagtcgcggatccatcgacgtcagacgcggaaggagctccggtggactttgccgacaggtaccaaaacaaatgttctcgtcacgcgggcatgcttcagatgctgcttccctgcaagacatgcgagagaatgaatcagaatttcagcatttgcttcacgcacgggaccagagactgttcagaatgtttccccggcgtgtcagaatctcaaccggtcgtcagaaagaggacgtatcggaaactctgtgccattcatcatctgctggggcgggctcccgagattgcttgctcggcctgcgatctggtcaacgtggacctggatgactgtgtttctgagcaataaatgacttaaaccaggtatggctgccgatggtcatcttccagattggctcgaggacaacctctctgagggcattcgcgagtggtgggacttgaaacctggagccccgaaacccaaagccaaccagcaaaagcaggacgacggccggggtctggtgcttcctggctacaagtacctcggacccttcaacggactcgacaagggggagcccgtcaacgcggcggacgcagcggccctcgagcacgacaaggcctacgaccagcagctcaaagcgggtgacaatccgtacctgcggtataaccacgccgacgccgagtttcaggagcgtcttcaagaagatacgtcttttgggggcaacctcgggcgagcagtcttccaggccaagaagcgggttctcgaacctctcggtctggttgaggaaggcgctaagacggctcctggaaagaagagacccatagaatcccccgactcctccacgggcatcggcaagaaaggccagcagcccgctaaaaagaagctcaactttgggcagactggcgactcagagtcagtgcccgaccctcaaccaatcggagaaccccccgcaggcccctctggtctgggatctggtacaatggctgcaggcggtggcgctccaatggcagacaataacgaaggcgccgacggagtgggtagttcctcaggaaattggcattgcgattccacatagctgggcgacagagtcatcaccaccagcacccgaacctgggccctccccacctacaacaaccacctctacaagcaaatctccaacgggacatcgggaggaagcaccaacgacaacacctacttcggctacagcaccccctgggggtattttgactttaacagattccactgccacttctcaccacgtgactggcagcgactcatcaacaacagctggggattccggcccaagagactcaacttcaagctcttcaacatccaggtcaaggaggtcacgcagaatgaaggcaccaagaccatcgccaataaccttaccagcacgattcaggtctttacggactcggaataccagctcccgtacgtcctcggctctgcgcaccagggctgcctgcctccgttcccggcggacgtcttcatgattcctcagtacgggtacctgactctgaacaacggcagtcaggccgtgggccgttcctccttctactgcctggagtactttccttctcaaatgctgagaacgggcaacaactttgagttcagctaccagtttgaggacgtgccttttcacagcagctacgcgcacagccaaagcctggaccggctgatgaaccccctcatcgaccagtacctgtactacctgtctcggactcagtccacgggaggtaccgcaggaactcagcagttgctattttctcaggccgggcctaataacatgtcggctcaggccaaaaactggctacccgggccctgctaccggcagcaacgcgtctccacgacactgtcgcaaaataacaacagcaactttgcttggaccggtgccaccaagtatcatctgaatggcagagactctctggtaaatcccggtgtcgctatggcaacgcacaaggacgacgaagagcgattttttccatccagcggagtcttgatgtttgggaaacagggagctggaaaagacaacgtggactatagcagcgttatgctaaccagtgaggaagaaatcaaaaccaccaacccagtggccacagaacagtacggcgtggtggccgataacctgcaacagcaaaacgccgctcctattgtaggggccgtcaacagtcaaggagccttacctggcatggtctggcagaaccgggacgtgtacctgcagggtcctatctgggccaagattcctcacacggacggcaactttcatccttcgccgctgatgggaggctttggactgaaacacccgcctcctcagatcctgattaagaatacacctgttcccgcggatcctccaactaccttcagtcaagccaagctggcgtcgttcatcacgcagtacagcaccggacaggtcagcgtggaaattgaatgggagctgcagaaagagaacagcaagcgctggaacccagagattcagtatacttccaactactacaaatctacaaatgtggactttgctgtcaatactgagggtacttattcagagcctcgccccattggcacccgttacctcacccgtaacctgtaattgcctgttaatcaataaaccggttaattcgtttcagttgaactttggtctctgcgaagggcgaattc

SEQ ID NO: 4961 - DNA, 3106 bp, Adeno-associated virus
gaattcgcccttctacggctgcgtcaactggaccaatgagaactttcccttcaacgattgcgtcgacaagatggtgatctggtgggaggagggcaagatgacggccaaggtcgtggagtccgccaaggccattctcggcggcagcaaggtgcgcgtggaccaaaagtgcaagtcgtccgcccagatcgaccccacccccgtgatcgtcacctccaacaccaacatgtgcgccgtgattgacgggaacagcaccaccttcgagcaccagcagccgttgcaggaccggatgttcaaatttgaactcacccgccgtctggagcatgactttggcaaggcgacaaagcaggaagtcaaagagttcttccgctgggcgcaggatcacgtgaccgaggtggcgcatgagttctacgtcagaaagggtggagccaacaagagacccgcccccgatgacgcggataaaagcgagcccaagcgggcccgcccctcagtcgcggatccatcgacgtcagacgcggaaggagctccggtggactttgccgacaggtaccaaaacaaatgttctcgtcacgcgggcatgcttcagatgctgtttccctgcaaaacatgcgagagaatgaatcagaatttcaacatttgcttcacgcacgggaccagagactgttcagaatgtttccccggcgtgtcagaatctcaaccggtcgtcagaaagaggacgtatcggaaactctgtgccattcatcatctgctggggcgggctcccgagattgcttgctcggcctgcgatctggtcaacgtggacctggatgactgtgtttctgagcaataaatgacttaaaccaggtatggctgccgatggttatcttccagattggctcgaggacaacctctctgagggcattcgcgagtggtgggacttgaaacctggagccccgaaacccaaagccaaccagcaaaagcaggacgacggccggggtctggtgcttcctggctacaagtacctcggacccttcaacggactcgacaagggagagccggtcaacgaggcagacgccgcggccctcgagcacgacaaggcctacgacaagcagctcgagcagggggacaacccgtacctcaagtacaaccacgccgacgccgagtttcaggagcgtcttcaagaagatacgtcttttgggggcaacctcgggcgagcagtcttccgggccaagaagcgggttctcgaacctctcggtctggttgaggaaggcgctaagacggctcctggaaagaagagacccatagaatcccccgactcctccacgggcatcggcaagaaaggccagcagcccgctaaaaagaagctcaactttgggcagactggcgactcagagtcagtgcccgacccccaacctctcggagaacctcccgccgcgccctcaggtctgggatctggtacaatggctgcaggcggtggcgcaccaatggcagacaataacgaaggcgccgacggagtgggtaatgcctccggaaattggcattgcgattccacatggctgggcgacagagtcatcaccaccagcacccgcacctgggccctgcccacctacaacaaccacctctacaagcagatatcaagtcagagcggggctaccaacgacaaccacttcttcggctacagcaccccctggggctattttgacttcaacagattccactgccacttctcaccacgtgactggcagcgactcatcaacaacaaccggggattccggcccagaaagctgcggttcaagttgttcaacatccaggtcaaggaggtcacgacgaacgacggcgttacgaccatcgctaataaccttaccagcacgattcaggtcttctcggactcggagtaccaactgccgtacgtcctcggctctgcgcaccagggctgcctccctccgttccctgcggacgtgttcatgattcctcagtacggatatctgactctaaacaacggcagtcagtctgtgggacgttcctccttctactgcctggagtactttccttctcagatgctgagaacgggcaataactttgaattcagctaccagtttgaggacgtgccctttcacagcagctacgcgcacagccaaagcctggaccggctgatgaaccccctcatcgaccagtacctgtactacctgtctcggactcagtccacgggaggtaccgcaggaactcagcagttgctattttctcaggccgggcctaataacatgtcggctcaggccaaaaactggctacccgggccctgctaccggcagcaacgcgtctccacgacactgtcgcaaaataacaacagcaactttgcttggaccggtgccaccaagtatcatctgaatggcagagactctctggtaaatcccggtgtcgctatggcaacgcacaaggacgacgaagagcgattttttccatccagcggagtcttgatgtttgggaaacagggagctggaaaagacaacgtggactatagcagcgttatgctaaccagtgaggaagaaatcaaaaccaccaacccagtggccacagaacagtacggcgtggtggccgataacctgcaacagcaaaacgccgctcctattgtaggggccgtcaacagtcaaggagccttacctggcatggcctggcagaaccgggacgtgtacctgcagggtcctatctgggccaagattcctcacacggacggcaactttcatccttcgccgctgatgggaggctttggactgaaacacccgcctcctcagatcctgattaagaatacacctgttcccgcggatcctccaactaccttcagtcaagccaagctggcgtcgttcatcacgcagtacagcaccggacaggtcagcgtggaaattgaatgggagctgcagaaagagaacagcaagcgctggaacccagagattcagtatacttccaactactacaaatctacaaatgtggactttgctgtcaatactgagggtacttattcagagcctcgccccattggcacccgttacctcacccgtaacctgtaattgcctgttaatcaataaaccggttaattcgtttcagttgaactttggtctctgcgaagggcgaattc

SEQ ID NO: 4962 - DNA, 3197 bp, Adeno-associated virus
gaattcgccctttctacggctgcgtcaactggaccaatgagaactttcccttcaacgattgcgtcgacaagatggtgatctggtgggaggagggcaagatgacggccaaggtcgtggagtccgccaaggccattctcggcggcagcaaggtgcgcgtggaccaaaagtgcaagtcgtccgcccagatcgaccccacccccgtgatcgtcacctccaacaccaacatgtgcgccgtgattgacgggaacagcaccaccttcgagcaccagcagccgttacaagaccggatgttcaaatttgaactcacccgccgtctggagcacgactttggcaaggtgacaaagcaggaagtcaaagagttcttccgctgggcgcaggatcacgtgaccgaggtggcgcatgagttctacgtcagaaagggtggagccaacaagagacccgcccccgatgacgcggataaaagcgagcccaagcgggcctgcccctcagtcgcggatccatcgacgtcagacgcggaaggagctccggtggactttgccgacaggtaccaaaacaaatgttctcgtcacgcgggcatgcttcagatgctgtttccctgcaagacatgcgagagaatgaatcagaatttcaacatttgcttcacgcacgggaccagagactgttcagaatgtttccccggcgtgtcagaatctcaaccggtcgtcagaaagaggacgtatcggaaactctgtgccattcatcatctgctggggcgggctcccgagattgcttgctcggcctgcgatctggtcaacgtggacctggatgactgtgtttctgagcaataaatgacttaaaccaggtatggctgccgatggttatcttccagattggctcgaggacaacctctctgagggcattcgcgagtggtgggacttgaaacctggagccccgaaacccaaagccaaccagcaaaagcaggacgacggccggggtctggtgcttcctggctacaagtacctcggacccttcaacggactcgacaagggagagccggtcaacgaggcagacgccgcggccctcgagcacgacaaggcctacgacaagcagctcgagcagggggacaacccgtacctcaagtacaaccacgccgacgccgagtttcaggagcgtcttcaagaagatacgtcttttgggggcaacctcgggcgagcagtcttccaggccaagaagcgggttctcgaacctctcggtctggttgaggaaggcgctaagacggctcctggaaagaagagaccggtagagccatcaccccagcgttctccagactcctctacgggcatcggcaagacaggccagcagcccgcgaaaaagagactcaactttgggcagactggcgactcagagtcagtgcccgaccctcaaccaatcggagaaccccccgcaggcccctctggtctgggatctggtacaatggctgcaggcggtggcgctccaatggcagacaataacgaaggcgccgacggagtgggtagttcctcaggaaattggcattgcgattccacatggctgggcgacagagtcatcaccaccagcacccgaacctgggccctccccacctacaacaaccacctctacaagcaaatctccaacgggacatcgggaggaagcaccaacgacaacacctacttcggctacagcaccccctgggggtattttgactttaacagattccactgccacttctcaccacgtgactggcagcgactcatcaacaacaactggggattccggcccaagagactcaacttcaagctcttcaacatccaggtcaaggaggtcacgcagaatgaaggcaccaagaccatcgccaataaccttaccagcacgattcaggtctttacggactcggaataccagctcccgtacgtcctcggctctgcgcaccagggctgcctgcctccgttcccggcggacgtcttcatgattcctcagtacgggtacctgactctgaacaacggcagtcaggccgtgggccgttcctccttctactgcctggagtactttccttctcaaatgctgagaacgggcaacaactttgagttcagctaccagtttgaggacgtgccttttcacagcagctacgcgcacagccaaagcctggaccggctgatgaaccccctcatcgaccagtacctgtactacctgtctcggactcagtccacgggaggtaccgcaggaactcagcagttgctattttctcaggccgggcctaataacatgtcggctcaggccaaaaactggctacccgggccctgctaccggcagcaacgcgtctccacgacactgtcgcaaaataacaacagcaactttgcttggaccggtgccaccaagtatcatctgaatggcagagactctctggtaaatcccggtgtcgctatggcaacgcacaaggacgacgaagagcgattttttccatccagcggagtcttgatgtttgggaaacagggagctggaaaagacaacgtggactatagcagcgttatgctaaccagtgaggaagaaatcaaaaccaccaacccagtggccacagaacagtacggcgtggtggccgataacctgcaacagcaaaacgccgctcctattgtaggggccgtcaacagtcaaggagccttacctggcatggtctggcagaaccgggacgtgtacctgcagggtcctatctgggccaagattcctcacacggacggcaactttcatccttcgccgctgatgggaggctttggactgaaacacccgcctcctcagatcctgattaagaatacacctgttcccgcggatcctccaactaccttcagtcaagccaagctggcgtcgttcatcacgcagtacagcaccggacaggtcagcgtggaaattgaatgggagctgcagaaagagaacagcaagcgctggaacccagagattcagtatacttccaactactacaaatctacaaatgtggactttgctgtcaatactgagggtacttattcagagcctcgccccattggcacccgttacctcacccgtaacctgtaattgcctgttaatcaataaaccggttaattcgtttcagttgaactttggtctctgcgaagggcgaattcgtttaaacctgcaggactagtccctttagtgagggttaattctgagcttggcgtaatcatgggtcatag

SEQ ID NO: 4963 - DNA, 3276 bp, Adeno-associated virus
gaattcgcccttcgcagagaccaaagttcaactgaaacgaattaaccggtttattgattaacaggcaattacaggttacgggtgaggtaacgggtgccaatggggcgaggctcagtataaaccccttcgttgttgacagcaaattccacattattagacttggcataatttgaggtgtactgaatctctggattccagcgtttgctgttttctttctgcagttcccactcgatctccacgctgacctggccggtgctgtactgcgtgataaatgaggcaaacttggcaggagtaaacacctctggaggattagcaggtaccggggtgtttttgatgagaatttgaggaggcgggtgtttgagtccaaatccgtccatcaggggagacgggtgaaagttgccgtccgtgtgaggaattttggcccagatgggaccctgcaggtacacgtcccggttctgccagaccatgccgggcagagccccctggctgttgacagtctgtgtctggggtccggccgtagacgattgcaggttgctggagaccacaccgtattcttctgtagccacgggattggtggttttgatctcctcctcgctggtcattagcacgttttccagcgttgtcttgttggcagcccccgttttgccaaaaaccagcactccgttgatgggaaagaactggtcctcgtcgtccttgttggtggccatggctacgcccgggttggttaatgaatttctaccattcagatggtatttagtggccccggtccaggcaaagttactgttgttgttgctgtctatgttttttgacagtctctgctgccgataacagggtccgggcagccagttctttgattgctcggccatggtgttgggcccagcctgatggaactgcagctcccttgtggaccccgtagtgctctgggtccgggccaggtagtacaggtactggtcgatgaggggattcatcagccggtccaggctctggctatgcgcatagctgctgtggaaaggcacttcctcaaaggtgtagctgaattcaaagttattgcccgttctcagcatctgagaaggaaagtactccaggcagtagaaggaggaacgtcccacagactgactgccgttgtttagagtcagatatccgtactgaggaatcatgaacacgtccgcagggaacggagggaggcagccctggtgcgcagagccgaggacgtacggcagttggtactccgagtccgagaagacctgaatcgtgctggtaaggttattagcgatggtcgtaacgccgtcgtccgtcgtgacctccttgacctggatgttgaacaacttgaaccgcagctttctgggccggaatccccagttgttgttgatgagtcgctgccagtcacgtggtgagaagtggcagtggaatctgttaaagtcaaaatacccccagggggtgctgtagccgaagtaggtgttgtcgttggtgcttcctcccgatgtcccgttggagatttgcttgtagaggtggttgttgtaggtggggagggcccaggttcgggtgctggtggtgatgactctgtcgcccagccatgtggaatcgcaatgccaatttcctgaggaactacccactccgtcggcgccttcgttattgtctgccattggagcgccaccgcctgcagccattgtaccagatcccagaccagaggggcctgcggggggttctccgattggttgagggtcgggcactgactctgagtcgccagtctgcccaaagttgagtctctttttcgcgggctgctggcctgtcttgccgatgcccgtagaggagtctggagaacgctggggtgatggctctaccggtctcttctttccaggagccgtcttagcgccttcctcaaccagaccgagaggttcgagaacccgcttcttggcctggaagactgctcgcccgaggttgcccccaaaagacgtatcttcttgaagacgctcctgaaactcggcgtcggcgtggttgtacttgaggtacgggttgtccccctgctcgagctgcttgtcgtaggccttgtcgtgctcgagggccgcggcgtctgcctcgttgaccggctctcccttgtcgagtccgttgaagggtccgaggtacttgtagccaggaagcaccagaccccggccgtcgtcctgcttttgctggttggctttgggtttcggggctccaggtttcaagtcccaccactcgcgaatgccctcagagaggttgtcctcgagccaatctggaagataaccatcggcagccatacctggtttaagtcatttattgctcagaaacacagtcatccaggtccacgttgaccagatcgcaggccgagcaagcaatctcgggagcccgccccagcagatgatgaatggcacagagtttccgatacgtcctctttctgacgaccggttgagattctgacacgccggggaaacattctgaacagtctctggtcccgtgcgtgaagcaaatgttgaaattctgattcattctctcgcatgtcttgcagggaaacagcatctgaagcatgcccgcgtgacgagaacacttgttttggtacctgtcggcaaagtccaccggagctccttccgcgtctgacgtcgatggatgcaaaatgtcgcaaaagcactcacgtgacagctaatacaggaccactcccctatgacgtgatttacgtcagcgctatgcccgcgtgacgagaacatttgttttggtacctgtcggcaaagtccaccggagctccttccgcgtctgacgtcgatggatccgcgactgaggggcaggcccgcttgggctcgcttttatccgcgtcatcgggggcgggtctcttgttggctccaccctttctgacgtagaactcatgcgccacctcggtcacgtgatcctgcgcccagcggaagaactctttgacttcctgctttgtcaccttgccaaagtcatgctccagacggcgggtgagttcaaatttgaacatccggtcctgcaacggctgctggtgctcgaaggtggtgctgttcccgtcaatcacggcgcacatgttggtgttggaagtgacgatcacgggggtgggatcgatctgggcggaagacttgcacttttggtccacgcgcaccttgctgccgccgagaatggccttggcggactccacgaccttggccgtcatcttgccctcctcccaccagatcaccatcttgtcgacgcaatcgttgaagggaaagttctcattggtccagttgacgcagccgtagaaagggcgaattc

SEQ ID NO: 4964 - protein, 738 aa, Adeno-associated virus; identical to SEQ ID NO: 4740

SEQ ID NO: 4965 - protein, 738 aa, Adeno-associated virus
MAADGYLPDWLEDNLSEGIREWWDLKPGAPKPKANQQKQDDGRGLVLPGYKYLGPFNGLDKGEPVNAADAAALEHDKAYDQQLKAGDNPYLRYNHADAEFQERLQEDTSFGGNLGRAVFQAKKRVLEPLGLVEEGAKTAPGKKRPVEPSPQRSPDSSTGIGKKGHQPARKRLNFGQTGDSESVPDPQPIGEPPAGPSGLGSGTMAAGGGAPMADNNEGADGVGSSSGNWHCDSTWLGDRVITTSTRTWALPTYNNHLYKQISNGTSGGSTNDNTYFGYSTPWGYFDFNRFHCHFSPRDWQRLINNNWGFRPKRLNFKLFNIQVKEVTQNEGTKTIANNLTSTIQVFTDSEYQLPYVPGSAHQGCLPPFPADVFMIPQYGYLTLNNGSQAVGRSSFYCLEYFPSQMLRTGNNFEFSYTFEDVPFHSSYAHSQSLDRLMNPLIDQYLYYLSRTQSTGGTQGTQQLLFSQAGPANMSAQAKNWLPGPCYRQQRVSTTLSQNNNSNFAWTGATKYHLNGRDSLVNPGVAMATHKDDEERFFPSSGVLMFGKQGAGKDNVDYSSVMLTSEEEIKTTNPVATEQYGVVADNLQQTNGAPIVGTVNSQGALPGMVWQNRDVYLQGPIWAKIPHTDGNFHPSPLMGGFGLKHPPPQILIKNTPVPADPPTTFSQAKLASFITQYSTGQVSVEIEWELQKENSKRWNPEIQYTSNYYKSTNVDFAVNTEGTYSEPRPIGTRYLTRNL

SEQ ID NO: 4966 - protein, 738 aa, Adeno-associated virus; identical to SEQ ID NO: 4738

SEQ ID NO: 4967 - DNA, 2489 bp, Adeno-associated virus
gaattcgccctttctacggctgcgtcaactggaccaatgagaactttcccttcaacgattgcgtcgacaagatggtgatctggtgggaggagggcaagatgacggccaaggtcgtgaagtccgccaaggccattcatcatctgctggggcgggctcccgagattgcttgctcggcctgcgatctggtcaacgtggacctggatgactgtgtttctgagcaataaatgacttaaaccaggtatggctgccgatggttatcttccagattggctcgaggacaacctctctgagggcattcgcgagtggtgggacttgaaacctggagccccgaaacccaaagccaaccagcaaaagcaggacgacggccggggtctggtgcttcctggctacaagtacctcggacccttcaacggactcgacaagggagagccggtcaacgaggcagacgccgcggccctcgagcacgacaaggcctacgacaagcagctcgagcagggggacaacccgtacctcaagtacaaccacgccgacgccgagtttcaggagcgtcttcaagaagatacgtcttttgggggcaacctcgggcgagcagtcttccaggccaagaagcgggttctcgaacctctcggtctggttgaggaaggcgctaagacggctcctggaaagaagagacccatagaatcccccgactcctccacgggcatcggcaggaaaggccagcagcccgctaaaaagaagctcaactttgggcagactggcgactcagagtcagtgcccgaccctcaaccaatcggagaaccccccgcaggcccctctggtctgggatctggtacaatggctgcaggcggtggcgctccaatggcagacaataacgaaggcgccgacggagtgggtaatgcctccggaaattggcattgcgattccacatggctgggcgacagagtcatcaccaccagcacccgcacctgggccctgcccacctacaacaaccacctctacaagcagatatcaagtcagagcggggctaccaacgacaaccacttcttcggctacagcaccccctggggctattttgacttcaacagattccactgccacttctcaccacgtgactggcagcgactcatcaacaacaactggggattccggcccagaaagctgcggttcaagttgttcaacatccaggtcaaggaggtcacgacgaacgacggcgttacgaccatcgccaataaccttaccagcacgattcaggtcttctcggactcggagtaccaactgccgtacgtcctcggctctgcgcaccagggctgcctccctccgttccctgcggacgtgttcatgattcctcagtacggatatctgactctaaacaacggcagtcagtctgtgggacgttcctccttctactgcctggagtactttccttctcagatgctgagaacgggcaataactttgaattcagctacacctttgaggaagtgcctttccacagcagctatgcgcacagccagagcctggaccggctgatgaatcccctcatcgaccagtacctgtactacctggcccggacccagagcactacggggtccacaagggagctgcagttccatcaggctgggcccaacaccatggccgagcaatcaaagaactggctgcccggaccctgttatcggcagcagagactgtcaaaaaacatagacagcaacaacaacagtaactttgcctggaccggggccactaaataccatctgaatggtagaaattcattaaccaacccgggcgtagccatggccaccaacaaggacgacgaggaccagttctttcccatcaacggagtgctggtttttggcaaaacgggggctgccaacaagacaacgctggaaaacgtgctaatgaccagcgaggaggagatcaaaaccaccaatcccgtggctacagaagaatacggtgtggtctccagcaacctgcaatcgtctacggccggaccccagacacagactgtcaacagccagggggctctgcccggcatggtctggcagaaccgggacgtgtacctgcagggtcccatctgggccaaaattcctcacacggacggcaactttcacccgtctcccctgatgggcggatttggactcaaacacccgcctcctcaaattctcatcaaaaacaccccggtacctgctaatcctccagaggtgtttactcctgccaagtttgcctcatttatcacgcagtacagcaccggccaggtcagcgtggagatcgagtgggaactgcagaaagaaaacagcaaacgctggaatccagagattcagtacacctcaaattatgccaagtctaataatgtggaatttgctgtcaacaacgaaggggtttatactgagcctcgccccattggcacccgttacctcacccgtaacctgtaattgcctgttaatcaataaaccggttaattcgtttcagttgaactttggtcaagggcgaattc

SEQ ID NO: 4968 - DNA, 3098 bp, Adeno-associated virus
gaattcgccctttctacggctgcgtcaactggaccaatgagaactttcccttcaacgattgcgtcgacaagatggtgatctggtgggaggagggcaagatgacggccaaggtcgtggagtccgccaaggccattctcggcggcagcaaggtgcgcgtggaccaaaagtgcaagtcttccgcccagatcgatcccacccccgtgatcgtcacttccaacaccaacatgtgcgccgtgattgacgggaacagcaccaccttcgagcaccagcagccgttacaagaccggatgttcaaatttgaactcacccgccgtctggagcacgactttggcaaggtgacaaagcaggaagtcaaagagttcttccgctgggcgcaggatcacgtgaccgaggtggcgcatgagttctacgtcagaaagggtggagccaacaagagacccgcccccgatgacgcggataaaagcgagcccaagcgggcctgcccctcagtcgcggatccatcgacgtcagacgcggaaggagctccggtggactttgccgacaggtaccaaaacaaatgttctcgtcacgcgggcatgcttcagatgctgtttccctgcaagacatgcgagagaatgaatcagaatttcaacatttgcttcacgcacgggaccggagactgttcagaatgtttccccggcgtgtcagaatctcaaccggtcgtcagaaagaggacgtatcggaaactctgtgccattcatcatctgctggggcgggctcccgagattgcttgctcggcctgcgatctggtcaacgtggacctggatgactgtgtttctgagcaataaatgacttaaaccaggtatggctgccgatggttatcttccagattggctcgaggacaacctctctgagggcattcgcgagtggtgggacttgaaacctggagccccgaaacccaaagccaaccagcaaaagcaggacgacggccggggtctggtgcttcctggctacaagtacctcggacccttcaacggactcgacaagggagagccggtcaacgcggcggacgcagcggccctcgagcacgacaaggcctacgaccagcagctcaaagcgggtgacaatccgtacctgcggtataaccacgccgacgccgagtttcaggagcgtcttcaagaagatacgtcttttgggggcaacctcgggcgagcagtcttccaggccaagaagcgggttctcgaacctctcggtctggttgaggaaggcgctaagacggctcctggaaagaagagacccatagaatcccccgactcctccacgggcatcggcaagaaaggccagcagcccgctaaaaagaagctcaactttgggcagactggcgactcagagtcagtgcccgaccctcaaccaatcggagaaccccccgcaggcccctctggtctgggatctggtacaatggctgcaggcggtggcgctccaatggcagacaataacgaaggcgccgacggagtgggtaatgcctccggaaattggcattgcgattccacatggctgggcgacagagtcatcaccaccagcacccgcacctgggccctgcccacctacaacaaccacctctacaagcagatatcaagtcagagcggggctaccaacgacaaccacttcttcggctacagcaccccctggggctattttgacttcaacagattccactgccacttctcaccacgtgactggcagcgactcatcaacaacaactggggattccggcccagaaagctgcggttcaagttgttcaacatccaggtcaaggaggtcacgacgaacgacggcgttacgaccatcgctaataaccttaccagcacgattcaggtcttctcggactcggagtaccaactgccgtacgtcctcggctctgcgcaccagggctgcctccctccgttccctgcggacgtgttcatgattcctcagtacggatatctgactctaaacaacggcagtcagtctgtgggacgttcctccttctactgcctggagtactttccttctcagatgctgagaacgggcaataactttgaattcagctacacctttgaggaagtgcctttccacagcagctatgcgcacagccagagcctggaccggctgatgaatcccctcatcgaccagtacctgtactacctggcccggacccagagcactacggggtccacaagggagctgcagttccatcaggctgggcccaacaccatggccgagcaatcaaagaactggctgcccggaccctgttatcggcggcagagactgtcaaaagacatagacagcaacaacaacagtaactttgcctggaccggggccactaaataccatctgaatggtagaaattcattaaccaacccgggcgtagccatggccaccaacaaggacgacgaggaccagttctttcccatcaacggagtgctggtttttggcaaaacgggggctgccaacaagacaacgctggaaaacgtgctaatgaccagcgaggaggagatcaaaaccaccaatcccgtggctacagaagaatacggtgtggtctccagcaacctgcaatcgtctacggccggaccccagacacagactgtcaacagccagggggctctgcccggcatggtctggcagaaccgggacgtgtacctgcagggtcccatctgggccaaaattcctcacacggacggcaactttcacccgtctcccctgatgggcggatttggactcaaacacccgcctcctcaaattctcatcaaaaacaccccggtacctgctaatcctccagaggtgtttactcctgccaagtttgcctcatttatcacgcagtacagcaccggccaggtcagcgtggagatcgagtgggaactgcagaaagagaacagcaaacgctggaatccagagattcagtacacctcaaattatgccaagtctaataatgtggaatttgctgtcaacaacgaaggggtttatactgagcctcgccccattggcacccgttacctcacccgtaacctgtaattacttgttaatcaataaaccggttgattcgtttcagttgaactttggtctctgcgaagggcgaattc

SEQ ID NO: 4969 - DNA, 2969 bp, Adeno-associated virus
gaattcgccctttctacggctgcgtcaactggaccaatgagaactttcccttcaacgattgcgtcgacaagatggtgatctggtgggaggagggcaagatgacggccaaggtcgtggagtccgccaaggccattctcggcggcagcaaggtgcgcgtggaccaaaagtgcaagtcgtccgcccagatcgaccccacccccgtgatcgtcacctccaacaccaacatgtgcgccgtgattgacgggaacagcaccaccttcgagcaccagcagccgttacaagaccggatgttcaaatttgaactcacccgccgtctggagcacgactttggcaaggtgacaaagcaggaagtcaaagagttcttccgctgggcgcaggatcacgtgaccgaggtggcgcatgagttctacgtcagaaagggtggagccaacaagagacccgcccccgatgacgcggataaaagcgagcccaagcgggcctgcccctcagtcgcggatccatcgacgtcagacgcggaaggagctccggtggactttgccgacaggtaccaaaacaaatgttctcgtcacgcgggcatgcttcagatgctgtttccctgcaagacatgcgagagaatgaatcagaatttcaacatttgcttcacgcacgggaccagagactgttcagaatgtttccccggcgtgtcagaatctcaaccggtcgtcagaaagaggacgtatcggaaactctgtgccattcatcatctgctggggcgggctcccgagattgcttgctcggcctgcgatctggtcaacgtggacctggatgactgtgtttctgagcaataaatgacttaaaccaggtatggctgccgatggttatcttccagattggctcgaggacaacctctctgagggcatccgcgagtggtgggacttgaaacctggagccccgaaacccaaagccaaccagcaaaagcaggacgacggccggggtctggtgcttcctggctacaagtacctcggacccttcaacggactcgacaagggagagccggtcaacgaggcagacgccgcggccctcgagcacgacaaggcctacgacaagcagctcgagcagggggacaacccgtacctcaagtacaaccacgccgacgccgagtttcaggagcgtcttcaagaagatacgtcttttgggggcaacctcgggcgagcagtcttccaggccaagaagcgggttctcgaacctctcggtctggttgaggaaggcgctaagacggctcctggaaagaagagaccggtagagccatcaccccagcgttctccagactcctctacgggcatcggcaagacaggccagcagcccgcgaaaaagagactcaactttgggcagactggcgactcagagtcagtgcccgaccctcaaccaatcggagaaccccccgcaggcccctctggtctgggatctggtacaatggctgcaggcggtggcgctccaatggcagacaataacgaaggcgccgacggagtgggtagttcctcaggaaattggcattgcgattccacatggctgggcgacagagtcatcaccaccagcacccgaacctgggccctccccacctacaacaaccacctctacaagcaaatctccaacgggacatcgggaggaagcaccaacgacaacacctacttcggctacagcaccccctgggggtattttgactttaacagattccactgccacttctcaccacgtgactggcagcgactcatcaacaacaactggggattccggcccaagagactcaacttcaagctcttcaacatccaggtcaaggaggtcacgcagaatgaaggcaccaagaccatcgccaataaccttaccagcacgattcaggtctttacggactcggaataccagctcccgtacgtcctcggctctgcgcaccagggctgcctgcctccgttcccggcggacgtcttcatgattcctcagtacgggtacctgactctgaacaacggcagtcaggccgtgggccgttcctccttctactgcctggagtactttccttctcaaatgctgagaacgggcaacaactttgagttcagctaccagtttgaggacgtgccttttcacagcagctacgcgcacagccaaagcctggaccggctgacgaaccccctcatcgaccagtacctgtactacctggcccggacccagagcactacggggtccacaagggggctgcagttccatcaggctgggcccaacaccatggccgagcaatcaaagaactggctgcccggaccctgttatcggcagcagagactgtcaaaaaacatagacagcaacaacaacagtaactttgcctggaccggggccactaaataccatctgaatggtagaaattcattaaccaacccgggcgtagccatggccaccaacaaggacgacgaggaccagttctttcccatcaacggagtgctggtttttggcaaaacgggggctgccaacaagacaacgctggaaaacgtgctaatgaccagcgaggaggagatcaaaaccaccaatcccgtggctacagaagaatacggtgtggtctccagcaacctgcaatcgtctacggccggaccccagacacagactgtcaacagccagggggctctgcccggcatggtctggcagaaccgggacgtgtacctgcagggtcccatctgggccaaaattcctcacacggacggcaactttcacccgtctcccctgatgggcggatttggactcaaacacccgcctcctcaaattctcatcaagtatacttccaactactacaaatctacaaatgtggactttgctgtcaatactgagggtacttattcagagcctcgccccattggcacccgttacctcacccgtaacctgtaattgcctgttaatcaataaaccggttaattcgtttcagttgaactttggtctctgcgaagggcgaattc

SEQ ID NO: 4970 - DNA, 3113 bp, Adeno-associated virus
gaattcgccctttctacggctgcgtcaactggaccaatgagaactttcccttcaacgattgcgtcgacaagatggtgatctggtgggaggagggcaagatgacggccaaggtcgtggagtccgccaaggccattctcggcggcagcaaggtgcgcgtggaccaaaagtgcaagtcgtccgcccagatcgatcccacccccgtgatcgtcacttccaacaccaacatgtgcgccgtgattgacgggaacagcaccaccttcgagcaccagcagccgttacaagaccggatgttcaaatttgaactcacccgccgtctggagcatgactttggcaaggtgacaaagcaggaagtcaaagagttcttccgctgggcgcaggatcacgtgaccgaggtggcgcatgagttctacgtcagaaagggtggagccaacaagagacccgcccccgatgacgcggataaaagcgagcccaagcgggcctgcccctcagtcgcggatccatcgacgtcagacgcggaaggagctccggtggactttgccgacaggtaccaaaacaaatgttctcgtcacgcgggcatgcttcagatgctgtttccctgcaagacatgcgagagaatgaatcagaatttcaacatttgcttcacgcacgggaccagagactgttcagaatgtttccccggcgtgtcagaatctcaaccggtcgtcagaaagaggacgtatcggaaactctgtgccattcatcatctgctggggcgggctcccgagattgcttgctcggcctgcgatctggtcaacgtggacctggatgactgtgtttctgagcaataaatgacttaaaccaggtatggctgccgatggttatcttccagattggctcgaggacaacctctctgagggcattcgcgagtggtgggacttgaaacctggagccccgaaacccaaagccaaccagcaaaagcaggacgacggccggggtctggtgcttcctggctacaagtacctcggacccttcaacggactcgacaagggggagcccgtcaacgcggcggacgcagcggccctcgagcacgacaaggcctacgaccagcagctcaaagcgggtgacaatccgtacctgcggtataaccacgccgacgccgagtttcaggagcgtcttcaagaagatacgtcttttgggggcaacctcgggcgagcagtcttccaggccaagaagcgggttctcgaacctctcggtctggttgaggaaggcgctaagacggctcctggaaagaagagacccatagaatcccccgactcctccacgggcatcggcaagaaaggccagcagcccgctaaaaagaagctcaactttgggcagactggcgactcagagtcagtgcccgaccctcaaccaatcggagaaccccccgcaggcccctctggtctgggatctggtacaatggctgcaggcggtggcgctccaatggcagacaataacgaaggcgccgacggagtgggtagttcctcaggaaattggcattgcgattccacatggctgggcgacagagtcatcaccaccagcacccgaacctgggccctccccacctacaacaaccacctctacaagcaaatctccaacgggacatcgggaggaagcaccaacgacaacacctacttcggctacagcaccccctgggggtattttgactttaacagattccactgccacttctcaccacgtgactggcagcgactcatcaacaacaactggggattccggcccaagagactcaacttcaagctcttcaacatccaggtcaaggaggtcacgcagaatgaaggcaccaagaccatcgccaataaccttaccagcacgattcaggtctttacggactcggaataccagctcccgtacgtcctcggctctgcgcaccagggctgcctgcctccgttcccggcggacgtcttcatgattcctcagtacgggtacctgactctgaacaacggcagtcaggccgtgggccgttcctccttctactgcctggagtactttccttctcaaatgctgagaacgggcaacaactttgagttcagctaccagtttgaggacgtgccttttcacagcagctatgcgcacagccaaagcctggaccggctgatgaaccccctcatcgaccagtacctgtactacctgtctcggactcagtccacgggaggtaccgcaggaactcagcagttgctattttctcaggccgggcctaataacatgtcggctcaggccaaaaactggctacccgggccctgctaccggcagcaacgcgtctccacgacagtgtcgcaaaataacaacagcaactttgcttggaccggtgccaccaagtatcatctgaatggcagagactctctggtaaatcccggtgtcgctatggcaacgcacaagggcgacgaagagcgattttttccatccagcggagtcttgatgtttgggaaacagggagctggaaaagacaacgtggactatagcagcgttatgctaaccagtgaggaagaaatcaaaaccaccaacccagtggccacagaacagtacggcgtggtggccgataacctgcaacagcaaaacgccgctcctattgtaggggccgtcaacagtcaaggagccttacctggcatggtctggcagaaccgggacgtgtacctgcagggtcctatctgggccaagattcctcacacggacggcaactttcatccttcgccgctgatgggaggctttggactgaaacacccgcctcctcagatcctgattaagaatacacctgttcccgcggatcctccaactaccttcagtcaagccaagctggcgtcgttcatcacgcagtacagcaccggacaggtcagcgtggaaattgaatgggagctgcagaaagagaacagcaagcgctggaacccagagattcagtatacttccaactactacaaatctacaaatgtggactttgctgtcaatactgagggtacttattcagagcctcgccccattggcacccgttacctcacccgtagcctgtaattgcctgttaatcaataaaccggttgattcgtttcagttgaactttggtctctgcgaagggcgaattc

SEQ ID NO: 4971 - DNA, 3128 bp, Adeno-associated virus
gaattcgccctttctacggctgcgtcaactggaccaatgagaactttcccttcaacgattgcgtcgacaagatggtgatctggtgggaggagggcaagatgacggccaaggtcgtggagtccgccaaggccattctcggcggcagcaaggtgcgcgtggaccaaaagtgcaagtcgtccgcccagatcgaccccacccccgtgatcgtcacctccaacaccaacatgtgcgccgtgattgacgggaacagcaccaccttcgagcaccagcagccgttgcaggaccggatgttcaaatttgaactcacccgccgtctggagcatgactttggcaaggtgacaaagcaggaagtcaaagagttcttccgctgggcgcaggatcacgtgaccgaggtggcgcatgagttctacgtcagaaagggtggagccaacaagagacccgcccccgatgacgcggataaaagcgagcccaagcgggcctgcccctcagtcgcggatccatcgacgtcagacgcggaaggagctccggtggactttgccgacaggtaccaaaacaaatgttctcgtcacgcgggcatgcttcagatgctgtttccctgcaagacatgcgagagaatgaatcagaatttcaacatttgcttcacgcgcgggaccagagactgttcagaatgtttcccgggcgtgtcagaatctcaaccggtcgtcagaaagaggacgtatcggaaactctgtgccattcatcatctgctggggcgggctcccgagattgcttgctcggcctgcgatctggtcaacgtggacctggatgactgtgtttctgagcaataaatgacttaaaccaggtatggctgccgatggttatcttccagattggctcgaggacaacctctctgagggcattcgcgagtggtgggacttgaaacctggagccccgaaacccaaagccaaccagcaaaagcaggacgacggccggggtctggtgcttcctggctacaagtacctcggacccttcaacggactcgacaagggggagcccgtcaacgcggcggacgcagcggccctcgagcacgacaaggcctacgaccagcagctcaaagcgggtgacaatccgtacctgcggtataaccacgccgacgccgagtttcaggagcgtctgcaagaagatacgtcttttgggggcaacctcgggcgagcagtcttccaggccaagaagcgggttctcgaacctctcggtctggttgaggaaggcgctaagacggctcctggaaagaagagaccggtagagccatcaccccagcgttctccagactcctctacgggcatcggcaagacaggccagcagcccgcgaaaaagagactcaactttgggcagactggcgactcagagtcagtgcccgaccctcaaccaatcggagaaccccccgcaggcccctctggtctgggatctggtacaatggctgcaggcggtggcgctccaatggcagacaataacgaaggcgccgacggagtgggtagttcctcaggaaattggcattgcgattccacatggctgggcgacagagtcatcaccaccagcacccgaacctgggccctccccacctacaacaaccacctctacaagcaaatctccaacgggacatcgggaggaagcaccaacgacaacacctacttcggctacagcaccccctgggggtattttgactttaacagattccactgccacttctcaccacgtgactggcagcgactcatcaacaacaactggggattccggcccaagagactcaacttcaagctcttcaacatccaggtcaaggaggtcacgcagaatgaaggcaccaagaccatcgccaataaccttaccagcacgattcaggtctttacggactcggaataccagctcccgtacgtcctcggctctgcgcaccagggctgcccgcctccgttcccggcggacgtcttcatgattcctcagtacgggtacctgactctgaacaacggcagtcaggccgtgggccgttcctccttctactgcctggagtactttccttctcaaatgcggagaacgggcaacaactttgagttcagctaccagtttgaggacgtgccttttcacagcagctacgcgcatagccaaagcctggaccggctgatgaaccccctcatcgaccagtacctgtactacctgtctcggactcagtccacgggaggtaccgcaggaactcagcagttgctattttctcaggccgggcctaataacatgtcggctcaggccaaaaactggctacccgggccctgctaccggcagcaacgcgtctccacgacactgtcgcaaaataacaacagcaactttgcttggaccggtgccaccaagtatcatctgaatggcagagactctctggtaaatcccggtgtcgctatggcaacgcacaaggacgacgaagagcgattttttccatccagcggagtcttgatgtttgggaaacagggagctggaaaagacaacgtggactatagcagcgttatgctaaccagtgaggaagaaatcaaaaccaccaacccagtggccacagaacagtacggcgtggtggccgataacctgcaacagcaaaacgccgctcctattgtaggggccgtcaacagtcaaggagccttacctggcatggtctggcagaaccgggacgtgtacctgcagggtcctatctgggccaagattcctcacacggacggcaactttcatccttcgccgctgatgggaggctttggactgaaacacccgcctcctcagatcctgattaagaatacacctgttcccgcggatcctccaactaccttcagtcaagccaagctggcgtcgttcatcacgcagtacagcaccggacaggtcagcgtggaaattgaatgggagctgcagaaagagaacagcaagcgctggaacccagagattcagtatacttccaactactacaaatctacaaatgtggactttgctgtcaatactgagggtacttattcagagcctcgccccattggcacccgttacctcacccgtaacctgtaattgcctgttaatcaataaaccggttaattcgtttcagttgaactttggtctctgcgaagggcgaattc

SEQ ID NO: 4972 - protein, 738 aa, Adeno-associated virus; identical to SEQ ID NO: 4965

SEQ ID NO: 4973 - DNA, 1933 bp, Adeno-associated virus
  modified_base (1302)..(1302): n is a, c, t or g
  misc_feature (1302)..(1302): n is a, c, g, or t
caaggcctacgaccagcagctcaaagcgggtgacaatccgtacctgcggtataaccacgccgacgccgagtttcaggagcgtcttcaagaagatacgtcttttgggggcaacctcgggcgagcagtcttccaggccaaaaagcgggttctcgaacctcttggtctggttgagacgccagctaagacggcacctggaaagaagcgaccggtagactcgccagactccacctcgggcatcggcaagaaaggccagcagcccgcgaaaaagagactcaactttgggcagactggcgactcagagtcagtccccgaccctcaaccaatcggagaaccaccagcaggcccctctggtctgggatctggtacaatggctgcaggcggtggcgcaccaatggctgacaataacgagggcgccgacggagtgggtaatgcctcaggaaattggcattgcgattccacatggctgggcgacagagtcatcaccaccagcacccgaacctgggccctgcccacctacaacaaccacctctacaagcaaatctccagtcagtcagcagggagcaccaacgataacgtctatttcggctacagcaccccctgggggtattttgacttcaacagattccattgccacttctcaccacgtgactggcagcgacttatcaacaacaactggggattccggcccaagaagctcaacttcaagctcttcaacatccaggtcaaggaggtcacgacgaatgacggtgtcacaaccatcgctaataaccttaccagcacggttcaggtcttttcggactcggaatatcaactgccgtacgtcctcggctccgcgcaccagggctgcctgcctccgttcccggcagacgtgttcatgattccgcagtacggatacctgactctgaacaatggcagccaatcggtaggccgttcctccttctactgcctggagtactttccttctcagatgctgagaacgggcaacaacttcacctttagctacaccttcgaggacgtgcctttccacagcagctacgcgcacagccagagtctggaccggctgatgaatcccctcatcgaccagtacctgtactacttggccagaacacagagcaacgcaggaggtactgctggcaatcgggaactgcagttttatcagggcggacctaccaccatggccgaacaagcaaagaactggctgcccggaccttgcttccggcaacagagagtatccaagacgctggatcaaaataacaacagcaactttgcctggactggtgccacaaaataccatttaaatgnaagaaattcattggttaatcccggtgtcgccatggcaacccacaaggacgacgaggaacgcttcttcccttcgagcggagttctaatttttggcaaaactggagcagctaataaaactacattagaaaacgtgctcatgacaaatgaagaagaaattcgtcctaccaacccggtagctaccgaggaatacgggattgtaagcagcaacttgcaggcggctagcaccgcagcccagacacaagttgttaacaaccagggagccttacctggcatggtctggcagaaccgggacgtgtacctgcaaggtcccatttgggccaagattcctcacacggacggcaactttcacccgtctcctctaatgggtggctttggactgaaacacccgcctccccagatcctgatcaaaaacacaccggtacctgctaatcctccagaagtgtttactcctgccaagtttgcttccttcatcacgcagtacagcaccgggcaagtcagcgttgagatcgagtgggagctgcagaaagagaacagcaagcgctggaacccagagattcagtacacctccaactttgacaaacagactggagtggactttgctgttgacagccagggtgtttactctgagcct

SEQ ID NO: 4974 - DNA, 3105 bp, Adeno-associated virus
gaattcgcccttgctgcgtcaactggaccaatgagaactttcccttcaacgattgcgtcgacaagatggtgatctggtgggaggagggcaagatgaccgccaaggtcgtggagtccgccaaggccattctgggcggaagcaaggtgcgcgtggaccaaaagtgcaagtcatcggcccagatcgaccccacgcccgtgatcgtcacctccaacaccaacatgtgcgccgtgatcgacgggaacagcaccaccttcgagcaccagcagccgctgcaggaccgcatgttcaagttcgagctcacccgccgtctggagcacgactttggcaaggtgaccaagcaggaagtcaaagagttcttccgctgggctcaggatcacgtgactgaggtggcgcatgagttctacgtcagaaagggcggagccaccaaaagacccgcccccagtgacgcggatataagcgagcccaagcgggcctgcccctcagttgcggagccatcgacgtcagacgcggaagcaccggtggactttgcggacaggtaccaaaacaaatgttctcgtcacgcgggcatgcttcagatgctgtttccctgcaagacatgcgagagaatgaatcagaatttcaacgtctgcttcacgcacggggtcagagactgctcagagtgcttccccggcgcgtcagaatctcaacccgtcgtcagaaaaaagacgtatcagaaactgtgcgcgattcatcatctgctggggcgggcacccgagattgcgtgttcggcccgcgatctcgtcaacgtggacttggatgactgtgtttctgagcaataaatgacttaaaccaggtatggctgctgacggttatcttccagattggctcgaggacaacctctctgagggcattcgcgagtggtgggacctgaaacctggagcccccaagcccaaggccaaccagcagaagcaggacgacggccggggtctggtgcttcctggctacaagtacctcggacccttcaacggactcgacaagggggagcccgtcaacgcggcggacgcagcggccctcgagcacgacaaggcctacgaccagcagctcaaagcgggtgacaatccgtacctgcggtataaccacgccgacgccgagtttcaggagcgtctgcaagaagatacgtcttttgggggcaacctcgggcgagcagtcttccaggccaagaagagggtactcgaacctctgggcctggttgaagaaggtgctaagacggctcctggaaagaagagaccgttagagtcaccacaagagcccgactcctcctcaggaatcggcaaaaaaggcaaacaaccagccaaaaagagactcaactttgaagaggacactggagccggagacggaccccctgaaggatcagataccagcgccatgtcttcagacattgaaatgcgtgcagcaccgggcggaaatgctgtcgatgcgggacaaggttccgatggagtgggtaatgcctcgggtgattggcattgcgattccacctggtctgagggcaaggtcacaacaacctcgaccagaacctgggtcttgcccacctacaacaaccacttgtacctgcggctcggaacaacatcaaacagcaacacctacaacggattctccaccccctggggatactttgactttaacagattccactgtcacttctcaccacgtgactggcaaagactcatcaacaacaactggggactacgaccaaaagccatgcgcgttaaaatcttcaatatccaagttaaggaggtcacaacgtcgaacggcgagactacggtcgctaataaccttaccagcacggttcagatatttgcggactcgtcgtatgagctcccgtacgtgatggacgctggacaagagggaagtctgtctcctttccccaatgacgtcttcatggtgcctcaatatggctactgtggcattgtgactggcgaaaatcagaaccagacggacagaaatgctttctactgcctggagtattttccttcacaaatgctgagaactggcaataactttgaaatggcttacaactttgggaaggtgccgttccactcaatgtatgcttacagccagagcccggacagactgatgaatcccctcctggaccagtacctgtggcacttacagtcgaccacctctggagagactctgaatcaaggcaatgcagcaaccacatttggaaaaatcaggagtggagactttgccttttacagaaagaactggctgcctgggccttgtgttaaacagcagagactctcaaaaactgccagtcaaaattacaagattcctgccagcgggggcaacgctctgttaaagtatgacacccactataccttaaacaaccgctggagcaacatagcgcctggacctccaatggcaacagctggaccttcagatggggacttcagcaacgcccagctcatcttccctggaccatcagtcaccggaaacacaacaacctcagcaaacaatctgttgtttacatcagaagaagaaattgctgccaccaacccaagagacacggacatgtttggtcagattgctgacaataatcagaatgctacaactgctcccataaccggcaacgtgactgctatgggagtgcttcctggcatggtgtggcaaaacagagacatttactaccaagggccaatttgggccaagatcccacacgcggacggacattttcatccttcaccgctaattggcggttttggactgaaacatccgcctccccagatatttatcaaaaacacccccgtacctgccaatcctgcgacaaccttcactgcagccagagtggactctttcatcacacaatacagcaccggccaggtcgctgttcagattgaatgggaaatcgaaaaggaacgctccaaacgctggaatcctgaagtgcagtttacttcaaactatgggaaccagtcttctatgttgtgggctcccgatacaactgggaagtatacagagccgcgggttattggctctcgttatttgactaatcatttgtaactgcctagttaatcaataaaccgtgtgattcgtttcagttgaactttggtctctgcgaagggcgaattc

SEQ ID NO: 4975 - protein, 733 aa, Adeno-associated virus
MAADGYLPDWLEDNLSEGIREWWDLKPGAPKPKANQQKQDDGRGLVLPGYKYLGPFNGLDKGEPVNAADAAALEHDKAYDQQLKAGDNPYLRYNHADAEFQERLQEDTSFGGNLGRAVFQAKKRVLEPLGLVEEGAKTAPGKKRPLESPQEPDSSSGIGKKGKQPAKKRLNFEEDTGAGDGPPEGSDTSAMSSDIEMRAAPGGNAVDAGQGSDGVGNASGDWHCDSTWSEGKVTTTSTRTWVLPTYNNHLYLRLGTTSNSNTYNGFSTPWGYFDFNRFHCHFSPRDWQRLINNNWGLRPKAMRVKIFNIQVKEVTTSNGETTVANNLTSTVQIFADSSYELPYVMDAGQEGSLPPFPNDVFMVPQYGYCGIVTGENQNQTDRNAFYCLEYFPSQMLRTGNNFEMAYNFEKVPFHSMYAHSQSLDRLMNPLLDQYLWHLQSTTSGETLNQGNAATTFGKIRSGDFAFYRKNWLPGPCVKQQRFSKTASQNYKIPASGGNALLKYDTHYTLNNRWSNIAPGPPMATAGPSDGDFSNAQLIFPGPSVTGNTTTSANNLLFTSEEEIAATNPRDTDMFGQIADNNQNATTAPITGNVTAMGVLPGMVWQNRDIYYQGPIWAKIPHADGHFHPSPLIGGFGLKHPPPQIFIKNTPVPANPATTFTAARVDSFITQYSTGQVAVQIEWEIEKERSKRWNPEVQFTSNYGNQSSMLWAPDTTGKYTEPRVIGSRYLTNHL

SEQ ID NO: 4976 - DNA, 3105 bp, Adeno-associated virus
gaattcgcccttgctgcgtcaactggaccaatgagaactttcccttcaacgattgcgtcgacaagatggtgatctggtgggaggagggcaagatgaccgccaaggtcgtggagtccgccaaggccattctgggcggaagcaaggtgcgcgtggaccaaaagtgcaagtcatcggcccagatcgaccccacgcccgtgatcgtcacctccaacaccaacatgtgcgccgtgatcgacgggaacagcaccaccttcgagcaccagcagccgctgcaggaccgcatgttcaagttcgagctcacccgccgtctggagcacgactttggcaaggtgaccaagcaggaagtcaaagagttcttccgctgggctcaggatcacgtgactgaggtggcgcatgagttctacgtcagaaagggcggagccaccaaaagacccgcccccagtgacgcggatataagcgagcccaagcgggcctgcccctcagttgcggagccatcgacgtcagacgcggaagcaccggtggactttgcggacaggtaccaaaacaaatgttctcgtcacgcgggcatgcttcagatgctgtttccctgcaagacatgcgagagaatgaatcagaatttcaacgtctgcttcacgcacggggtcagagactgctcagagtgcttccccggcgcgtcagaatctcaacccgtcgtcagaaaaaagacgtatcagaaactgtgcgcgattcatcatctgctggggcgggcacccgagattgcgtgttcggcctgcgatctcgtcaacgtggacttggatgactgtgtttctgagcaataaatgacttaaaccaggtatggctgctgacggttatcttccagattggctcgaggacaacctctctgagggcattcgcgagtggtgggacctgaaacctggagcccccaagctcaaggccaaccagcagaagcaggacgacggccggggtctggtgcttcctggctacaagtacctcggacccttccacggactcgacaagggggagcccgtcaacgcggcggacgcagcggccctcgagcacgacaaggcctacgaccagcagctcaaagcgggtgacaatccgtacctgcggtataaccacgccgacgccgagtttcaggagcgtctgcaagaagatacgtcttttgggggcaacctcgggcgagcagtcttccaggccaagaagagggtactcgaaccactgggcctggttgaagaaggtgctaagacggctcctggaaagaagagaccgttagagtcaccacaagagcccgactcctcctcaggaatcggcaaaaaaggcaaacaaccagccaaaaagagactcaactttgaagaggacactggagccggagacggaccccctgaaggatcagataccagcgccatgtcttcagacattgaaatgcgtgcagcaccgggcggaaatgctgtcgatgcgggacaaggttccgatggagtgggtaatgcctcgggtgattggcattgcgattccacctggtctgagggcaaggtcacaacaacctcgaccagaacctgggtcttgcccacctacaacaaccacttgtacctgcggctcggaacaacatcaaacagcaacacctacaacggattctccaccccctggggatactttgactttaacagattccactgtcacttctcaccacgtgactggcaaagactcatcaacaacaactggggactacgaccaaaagccatgcgcgttaaaatcttcaatatccaagttaaggaggtcacaacgtcgaacggcgagactacggtcgctaataaccttaccagcacggttcagatatttgcggactcgtcgtatgagctcccgtacgtgatggacgctggacaagagggaagtctgcctcctttccccaatgacgtcttcatggtgcctcaatatggctactgtggcattgtgactggcgaaaatcagaaccagacggacagaaatgctttctactgcctggagtattttccttcacaaatgctgagaactggcaataactttgaaatggcttacaactttgagaaggtgccgttccactcaatgtatgctcacagccagagcctggacagactgatgaatcccctcctggaccagtacctgtggcacttacagtcgaccacctctggagagactctgaatcaaggcaatgcagcaaccacatttggaaaaatcaggagtggagactttgccttttacagaaagaactggctgcctgggccttgtgttaaacagcagagattctcaaaaactgccagtcaaaattacaagattcctgccagcgggggcaacgctctgttaaagtatgacacccactataccttaaacaaccgctggagcaacatagcgcctggacctccaatggcaacagctggaccttcagatggggacttcagcaacgcccagctcatcttccctggaccatcagtcaccggaaacacaacaacctcagcaaacaatctgttgtttacatcagaaggagaaattgctgccaccaacccaagagacacggacatgtttggtcagattgctgacaataatcagaatgctacaactgctcccataaccggcaacgtgactgctatgggagtgcttcctggcatggtgtggcaaaacagagacatttactaccaagggccaatttgggccaagatcccacacgcggacggacattttcatccttcaccgctaattggcggttttggactgaaacatccgcctccccagatatttatcaaaaacacccccgtacctgccaatcctgcgacaaccttcactgcagccagagtggactctttcatcacacaatacagcaccggccaggtcgctgttcagattgaatgggaaatcgaaaaggaacgctccaaacgccggaatcctgaagtgcagtttacttcaaactatgggaaccagtcttctatgttgtgggctcccgatacaactgggaagtatacagagccgcgggttattggctctcgttatttgactaatcatttgtaactgcctagttaatcaataaaccgtgtgattcgtttcagttgaactttggtctctgcgaagggcgaattc

SEQ ID NO: 4977 - DNA, 3105 bp, Adeno-associated virus
gaattcgcccttcgcagagaccaaagttcaactgaaacgaatcacacggtttattgattaactaggcagttacaaatgattagtcaaataacgagagccaataacccgcggctctgtatacttcccagttgtatcgggagcccacaacatagaagactggttcccacagtttgaagtaaactgcacttcaggattccagcgtttggagcgttccttttcgatttcccattcaatctgaacagcgacctggccggtgctgtattgtgtgatgaaagagtccactctggctgcagtgaaggttgtcgcaggataggcaggtacgggggtgtttttgataaatatctggggaggcggatgtttcagtccaaaaccgccaattagcggtgaaggatgaaaatgtccgtccgcgtgtgggatcttggcccaaattggcccttggtagtaaatgtctctgttttgccacaccatgccaggaagcactcccatagcagtcacgttgccggttatgggagcagttgtagcattctgattattgtcagcaatctgaccaaacatgtccgtgtctcttgggttggtggcagcaatttcttcttctgatgtaaacaacagattgtttgctgaggttgttgtgtttccggtgactgatggtccagggaagatgagctgggcgttgctgaagtccccatctgaaggtccagctgttgccattggaggtccaggcgctatgttgctccagcggttgtttaaggtatagtgggtgtcatactttaacagagcgttgcccccgctggcaggaatcttgtaattttgactggcagtttttgagaatctctgctgtttaacacaaggcccaggcagccagttctttctgtaaaaggcaaagtctccactcctgatttttccaaatgtggttgctgcattgccttgattcagagtctctccagaggtggtcgactgtaagtgccacaggtactggtccaggaggggattcatcagtccgtccaggctctggctgtgagcatacattgagtggaacggcaccttctcaaagttgtaagccgtttcaaagttattgccagttctcagcatttgtgaaggaaaatactccaggcagtagaaagcatttctgtccgtctggttctgattttcgccagtcacaatgccacagtagccatattgaggcaccatgaagacgtcattggggaaaggaggcagacttccctcttgtccagcgtccatcacgtacgggagctcatacgacgagtccgcaaatatctgaaccgtgctggtaaggttattagcgaccgtagtctcgccgttcgacgttgtgacctccttaacttggatattgaagattttaacgcgcatggcttttggtcgtagtccccagttgttgttgatgagtctttgccagtcacgtggtgagaagtgacagtggaatctgttaaagtcaaagtatccccagggggtggagaatccgttgtaggtgttgctgtttgatgttgttccgagccgcaggtacaagtggttgttgtaggtgggcaagacccaggttctggtcgaggttgttgtgaccttgccctcagaccaggtggaatcgcaatgccaatcacccgaggcattacccactccatcggaaccttgtcccgcatcgacagcatttccgcccggtgctgcacgcatttcaatgtctgaagacatggcgctggtatctgatccttcagggggtccgtctccggctccagtgtcctcttcaaagttgagtctctttttggctggttgtttgccttttttgccgattcctgaggaggagtcgggctcttgtggtgactctaacggtctcttctttccaggagccgtcttagcaccttcttcaaccaggcccagaggttcgagtaccctcttcttggcctggaagactgctcgcccgaggttgcccccaaaagacgtatcttcttgcagacgctcctgaaactcggcgtcggcgtggttataccgcaggtacggattgtcacccgctttgagctgctggtcgtaggccttgtcgtgctcgagggccgctgcgtccgccgcgttgacgggctcccccttgtcgagtccgttgaagggtccgaggtactcgtagccaggaagcaccagaccccggccgtcgtcctgcttctgctggttggccttgggcttgggggctccaggtttcaggtcccaccactcgcgaatgccctcagagaggttgtcctcgagccaatctggaagataaccgtcagcagccatacctggtttaagtcatttattgctcagaaacacagtcatccaagtccacgttgacgagatcgcaggccgaacacgcaatctcgggtgcccgccccagcagatgatgaatcgcgcacagtttctgatacgtcttttttctgacgacgggttgagattctgacgcgccggggaagcactctgagcagtctctgaccccgtgcgtgaagcagacgttgaaattctgattcattctctcgcatgtcttgcagggaaacagcatctgaagcatgcccgcgtgacgagaacatttgttttggtacctgtccgcaaggtccaccggtgcttccgcgtctgacgtcgatggctccgcaactgaggggcaggcccgcttgggctcgcttatatccgcgtcactgggggcgggtcttttggtggctccgccctttctgacgtagaactcatgcgccacctcagtcacgtgatcctgagcccagcggaagaactctttgacttcctgcttggtcaccttgccaaagtcgtgctccagacggcgggtgagctcgaacttgaacatgcggtcctgcagcggctgctggtgctcgaaggtggtgctgttcccgtcgatcacggcgcacatgttggtgttggaggtgacgatcacgggcgtggggtcgatctgggccgatgacttgcacttttggtccacgcgcaccttgcttccgcccagaatggccttggcggactccacgaccttggcggtcatcttgccctcctcccaccagatcaccatcttgtcgacgcaatcgttgaagggaaagttctcattggtccagttgacgcagcaagggcgaattc

SEQ ID NO: 4978 - DNA, 3094 bp, Adeno-associated virus
gaattcgcccttgctgcgtcaactggaccaagagaactttcccttcaacgattgcgtcgacaagatggtgatctggtgggaggagggcaagatgacggccaaggtcgtggagtccgccaaagccattctgggcggaagcaaggtgcgcgtcgaccaaaagtgcaagtcctcggcccagatcgatcccacccccgtgatcgtcacctccaacaccaacatgtgcgccgtgatcgacgggaacagcaccaccttcgagcaccagcagccgttgcaggaccggatgttcaaatttgaactcacccgccgtctggaacacgactttggcaaggtgaccaagcaggaagtcaaagagttcttccgctgggctagtgatcacgtgactgaggtgacgcatgagttctacgtcagaaagggcggagccagcaaaagacccgcccccgatgacgcggatataagcgagcccaagcgggcctgtccctcagtcacggacccatcgacgtcagacgcggaaggagctccggtggactttgccgacaggtaccaaaacaaatgttctcgtcacgcgggcatgcttcagatgctgtttccctgcaaaacgtgcgagagaatgaatcagaatttcaacatttgcttcacgcacggggtcagagactgtttagaatgtttccccggcgtgtcagaatctcaaccggtcgtcagaaaaaagacgtatcggaagctgtgtgcgattcatcatctgctggggcgggcacccgagattgcttgctcggcctgcgacctggtcaacgtggacctggacgactgtgtttctgagcaataaatgacttaaaccgggtatggctgccgatggttatcttccagattggctcgaggacaacctctctgagggcattcgcgagtggtgggacctgaaacctggagccccgaaacccaaagccaaccagcaaaagcaggacgacggccggggtctggtgcttcctggctacaagtacctcggacccttcaacggactcgacaagggggagcccgtcaacgcggcggacgcagcggccctcgagcacgacaaggcctacgaccagcagctcaaagcgggtgacaatccgtacctgcggtataaccacgccgacgccgagtttcaggagcgtctgcaagaagatacgtcatttgggggcaacctcgggcgagcagtcttccaggccaagaagcgggttctcgaacctctcggtctggttgaggaaggcgctaagacggctcctggaaagaagagacccatagactctccagactcctccacgggcatcggcaaaaaaggccagcagcccgctaaaaagaagctcaattttggtcagactggcgactcagagtcagtccccgaccctcaacctcttggagaacctccagcagcgccctctagtgtgggatctggtacaatggctgcaggcggtggcgcaccaatggcagacaataacgaaggtgccgacggagtgggtaatgcctcaggaaattggcattgcgattccacatggctgggcgacagagtcatcaccaccagcaccagaacctgggccctccccacctacaacaaccacctctacaagcaaatctccagcagcagctcaggagccaccaatgacaaccactacttcggctacagcaccccctgggggtattttgactttaacagattccactgccacttctcaccacgtgactggcagcgactcatcaacaacaactggggattccggcccaagaagctgcggttcaagctcttcaacatccaggtcaaggaggtcacaacgaatgacggcgtcacgaccatcgctaataaccttaccagcacggttcaggtcttctcggactcggaataccagctgccgtacgtcctcggctctgcgcaccagggctgcctgcctccgttcccggcggacgtcttcatgattcctcagtacggctacctgactctgaacaacggcagccaatcggtgggccgttcctccttctactgcctggaatatttcccctctcaaatgctgagaacgggcaacaactttgagttcagttacagcttcgaggacgtgcctttccacagcagctacgcgcacagccagagcctagaccggctgatgaaccctctcatcgaccagtacctgtactacctggcccggacccagagcaccacgggttccaccagggaactgcaatttcatcaagctgggcccaatactatggccgagcagtcaaagaactggctgcctggaccctgctataggcaacagggactgtcaaagaacttggactttaacaacaacagcaattttgcctggactgctgccactaaatatcatctgaatggcagaaactctttgaccaatcctggcattcccatggcaaccaacaaggatgatgaggaccagttctttcccatcaacggggtactggtttttggcaagacgggagctgccaacaaaactacgctggaaaacgttctgatgaccagcgaggaggagatcaagaccactaaccctgtggctacagaagaatacggtgtggtctccagcaacctgcagccgtctacagccgggcctcaatcacagactatcaacagccagggagcactgcctggcatggtctggcagaaccgggacgtgtatctgcagggtcccatctgggccaaaattcctcacacggatggcaactttcacccgtctcctctgatgggcggttttggactcaaacacccgcctccacagatcctgatcaaaaacacacctgtacctgctaatcctccggaggtgtttactcctgccaagtttgcctccttcatcacgcagtacagcaccggacaagtcagcgtggaaatcgagtgggagctgcagaaagaaaacagcaagcgctggaacccagaaattcagtatacttccaattatgccaagtctaataatgttgaatttgctgtgaaccctgatggtgtttatactgagcctcgccccattggcactcgttacctcccccgtaatctgtaattgcttgttaatcaataaaccggttgattcgtttcagttgaactttggtctctgcgaagggcgaattc

SEQ ID NO: 4979 - DNA, 3095 bp, Adeno-associated virus
gaattcgcccttcgcagagaccaaagttcaactgaaacgaatcaaccggtttattgattaacaagcaattacagattacgggtgaggtaacgagtgccaatggggcgaggctcagtataaacaccatcagggttcacagcaaattcaacattattagacttggcataattggaagtatactgaatttctgggttccagcgcttgctgttttctttctgcagctcccactcgatttccacgctgacttgtccggtgctgtactgcgtgatgaaggaggcaaacttggcaggagtaaacacctccggaggattagcaggtacaggtgtgtttttgatcaggatctgtggaggcgggtgtttgagtccaaaaccgcccatcagaggagacgggtgaaagttgccatccgtgtgaggaattttggcccagatgggaccctgcagatacacgtcccggttctgccagaccatgccaggcagtgctccctggctgttgatagtctgtgattgaggcccggctgtagacgactgcaggttgctggagaccacaccgtattcttctgtagccacagggttagtggtcttgatctcctcctcgctggtcatcagaacgttttccagcgtagttttgttggcagctcccgtcttgccaaaaaccagtaccccgttgatgggaaagaactggtcctcatcatccttgttggttgccatgggaatgccaggattggtcaaagagtttctgccattcagatgatatttagtggcagcagtccaggcaaaattgctgttgttgttaaagtccaagttctttgacagtctctgttgcctatagcagggtccaggcagccagttctttgactgctcggccatagtattgggcccagcttgatgaaattgcagttccctggtggaacccgtggtgctctgggtccgggccaggtagtacaggtactggtcgatgagagggttcatcagccggtctaggctctggctgtgcgcgtagctgctgtggaaaggcacgtcctcgaagctgtaactgaactcaaagttgttgcccgttctcagcatttgagaggggaaatattccaggcagtagaaggaggaacggcccaccgattggctgccgttgtccagagtcaggtagccgtactgaggaatcatgaagacgtccgccgggaacggaggcaggcagccctggtgcgcagagccgaggacgtacggcagctggtattccgagtccgagaagacctgaaccgtgctggtaaggttattagcgatggtcgtgacgccgtcattcgttgtgacctccttgacctggatgttgaggagcttgaaccgcagcttcttgggccggaatccccagttgttgttgatgagtcgctgccagtcacgtggtgagaagtggcagtggaatctgttaaagtcaaaatacccccagggggtgctgtagccgaagtagtggttgtcattggtggctcctgagctgctgctggagatttgcttgtagaggtggttgttgtaggtggggagggcccaggttctggtgctggtggtgatgactctgtcgcccagccatgtggaatcgcaatgccaatttcctgaggcattacccactccgtcggcaccttcgttattgtctgccattggtgcgccaccgcctgcagccattgtaccagatcccacactagagggcgctgctggaggttctccaagaggttgagggtcggggactgactctgagtcgccagtctgaccaaaattgagcttctttttagcgggctgctggccttttttgccgatgcccgtggaggagtctggagagcctatgggtctcttctttccaggagccgtcttagcgccttcctcaaccagaccgagaggttcgagaacccgcttcttggcctggaagactgctcgcccgaggttgcccccaaatgacgtatcttcttgcagacgctcctgaaactcggcgtcggcgtggttataccgcaggtacggattgtcacccgctttgagctgctggtcgtaggccttgtcgtgctcgagggccgctgcgtccgccgcgttgacgggctcccccttgtcgagtccgttgaagggtccgaggtacttgtagccaggaagcaccagaccccggccgtcgtcctgcttttgctggttggctttgggtttcggggctccaggtttcaggtcccaccactcgcgaatgccctcagagaggttgtcctcgagccaatctggaagataaccatcggcagccatacctggtttaagtcatttattgctcagaaacacagtcgtccaggtccacgttgaccaggtcgcaggccgagcaagcaatctcgggtgcccgccccagcagatgatgaatcgcacacagcttccgatacgtcttttttctgacgaccggttgagattctgacacgccggggaaacattctaaacagtctctgaccccgtgcgtgaagcaaatgttgaaattctgattcattctctcgcacgttttgcagggaaacagcacctgaagcatgcccgcgtgacgagaacatttgttttggtacctgtcggcaaagtccaccggagctccttccgcgtctgacgtcgatgggtccgtgactgagggacgggcccgcttgggctcgcttatatccgcgtcatcgggggcgggtcttttgctggctccgccctttctgacgtagaactcatgcgtcacctcagtcacgtgatcactagcccagcggaagaactctttgacttcctgctttgtcaccttgccaaagtcgtgttccagacggcgggtgagttcaaatttgaacatccggtcctgcaacggttgctggtgctcgaaggtggtgctgttcccgtcgatcacggcgcacatgttggtgttggaggtgacgatcacgggggtgggatcgatctgggcggacgacttgcacttttggtccacgcgcaccttgctgccgccgagaatggccttggcggactccacgaccttggccgtcatcttgccctcctcccaccagatcaccatcttgtcgacgcaatcgttgaagggaaagttctcattggtccagttgacgcagcaagggcgaattc

SEQ ID NO: 4980 - DNA, 3095 bp, Adeno-associated virus
gaattcgcccttcgcagagaccaaagttcaactgaaacgaatcaaccggtttattgattaacaagcaattacagattacgggtgaggtaacgagtgccaatggggcgaggctcagtataaacaccatcagggttcacagcaaattcaacattattagacttggcataattggaagtatactgaatttctgggttccagcgcttgctgttttctttctgcagctcccactcgatttccacgctgacttgtccggtgctgtactgcgtgatgaaggaggcaaacttggcaggagtaaacacctccggaggattagcaggtacaggtgtgtttttgatcaggatctgtggaggcgggtgttcgagtccaaaaccgcccatcagaggagacgggtgaaagttgccatccgtgtgaggaattttggcccagatgggaccctgcagatacacgtcccggttctgccagaccatgccaggcagtgctccctggctgttgatagtctgtgattgaggcccggctgtagacgactgcaggttgctggagaccacaccgtattcttctgtagccacagggttagtggtcttgatctcctcctcgctggtcatcagaacgttttccagcgtagttttgttggcagctcccgtcttgccaaaaaccagtaccccgttgatgggaaagaactggtcctcatcatccttgttggttgccatgggaatgccaggattggtcaaagagtttctgccattcagatgatatttagtggcagcagtccaggcaaaattgctgttgttgttaaagtccaagttctttgacagtctctgttgcctatagcagggtccaggcagccagttctttgactgctcggccatagtattgggcccagcttgatgaaattgcagttccctggtggaacccgtggtgctctgggtccgggccaggtagtacaggtactggtcgatgagagggttcatcagccggtctaggctctggctgtgcgcgtagctgctgtggaaaggcacgtcctcgaagctgtaactgaactcaaagttgttgcccgttctcagcatttgagaggggaaatattccaggcagtagaaggaggaacggcccaccgattggctgccgttgttcagagtcaggtagccgtactgaggaatcatgaagacgtccgccgggaacggaggcaggcagccctggtgcgcagagccgaggacgtacggcagctggtattccgagtccgagaagacctgaaccgtgctggtaaggttattagcgatggtcgtgacgccgtcattcgttgtgacctccttgacctggatgttgaagagcttgaaccgcagcttcttgggccggaatccccagttgttgttgatgagtcgctgccagtcacgtggtgagaagtggcagtggaatctgttaaagtcaaaatacccccagggggtgctgtagccgaagtagtggttgtcattggtggctcctgagctgctgctggagatttgcttgtagaggtggttgttgtaggtggggagggcccaggttctggtgctggtggtgatgactctgtcgcccagccatgtggaatcgcaatgccaatttcctgaggcattacccactccgtcggcaccttcgttattgtctgccgttggtgcgccaccgcctgcagccattgtaccagatcccacactagagggcgctgctggaggttctccaagaggttgagggtcggggactgactctgagtcgccagtctgaccaaaattgagcttctttttagcgggctgctggccttttttgccgatgcccgtggaggagtctggagagtctatgggtctcttctttccaggagccgtcttagcgccttcctcaaccagaccgagaggttcgagaacccgcttcttggcctggaagactgctcgcccgaggttgcccccaaatgacgtatcttcttgcaggcgctcctgaaactcggcgtcggcgtggttataccgcaggtacggattgtcacccgctttgagctgctggtcgtaggccttgtcgtgctcgagggccgctgcgtccgccgcgttgacgggctcccccttgtcgagtccgttgaagggtccgaggtacttgtagccaggaagcaccagaccccggccgtcgtcctgcttttgctggttggctttgggtttcggggctccaggtttcaggtcccaccactcgcgaatgccctcagagaggttgtcctcgagccaatctggaagataaccatcggcagccatacctggtttaagccatttattgctcagaaacacagtcgtccaggtccacgttgaccaggtcgcaggccgagcaggcaatctcgggtgcccgccccagcagatgatgaatcgcacacagcttccgatacgtcttttttctgacgaccggttgagattctgacacgccggggaaacattctaaacagtctctgaccccgtgcgtgaagcaaatgttgaaattctgattcattctctcgcacgttttgcagggaaacagcatctgaagcatgcccgcgtggcgagaacatttgttttggtacctgtcggcaaagtccaccggagctccttccgcgtctgacgtcgatgggtccgtgactgagggacaggcccgcttgggctcgcttatatccgcgtcatcgggggcgggtcttttgctggctccgccctttctgacgtagaactcatgcgtcacctcagtcacgtgatcactagcccagcggaagaactctttgacttcctgctttgtcaccttgccaaagtcgtgttccagacggcgggtgagttcaaatttgaacatccggtcctgcaacggctgctggtgctcgaaggtggtgctgttcccgtcgatcacggcgcgcatgttggtgttggaggtgacgatcacgggggtgggatcgatctgggcggacgacttgcacttttggtccacgcgcaccttgctgccgccgagaatggccttggcggactccacgaccttggccgtcatcttgccctcctcccaccagatcaccatcttgtcgacgcaatcgttgaagggaaagttctcattggtccagttgacgcagcaagggcgaattc

SEQ ID NO: 4981 - protein, 729 aa, Adeno-associated virus; identical to SEQ ID NO: 4796

SEQ ID NO: 4982 - protein, 729 aa, Adeno-associated virus
MAADGYLPDWLEDNLSEGIREWWDLKPGAPKPKANQQKQDDGRGLVLPGYKYLGPFNGLDKGEPVNAADAAALEHDKAYDQQLKAGDNPYLRYNHADAEFQERLQEDTSFGGNLGRAVFQAKKRVLEPLGLVEEGAKTAPGKKRPIDSPDSSTGIGKKGQQPAKKKLNFGQTGDSESVPDPQPLGEPPAAPSSVGSGTMAAGGGAPTADNNEGADGVGNASGNWHCDSTWLGDRVITTSTRTWALPTYNNHLYKQISSSSSGATNDNHYFGYSTPWGYFDFNRFHCHFSPRDWQRLINNNWGFRPKKLRFKLFNIQVKEVTTNDGVTTIANNLTSTVQVFSDSEYQLPYVLGSAHQGCLPPFPADVFMIPQYGYLTLNNGSQSVGRSSFYCLEYFPSQMLRTGNNFEFSYSFEDVPFHSSYAHSQSLDRLMNPLIDQYLYYLARTQSTTGSTRELQFHQAGPNTMAEQSKNWLPGPCYRQQRLSKNLDFNNNSNFAWTAATKYHLNGRNSLTNPGIPMATNKDDEDQFFPINGVLVFGKTGAANKTTLENVLMTSEEEIKTTNPVATEEYGVVSSNLQSSTAGPQSQTINSQGALPGMVWQNRDVYLQGPIWAKIPHTDGNFHPSPLMGGFGLKHPPPQILIKNTPVPANPPEVFTPAKFASFITQYSTGQVSVEIEWELQKENSKRWNPEIQYTSNYAKSNNVEFAVNPDGVYTEPRPIGTRYLTRNL

SEQ ID NO: 4983 - protein, 729 aa, Adeno-associated virus
MAADGYLPDWLEDNLSEGIREWWDLKPGAPKPKANQQKQDDGRGLVLPGYKYLGPFNGLDKGEPVNAADAAALEHDKAYDQQLKAGDNPYLRYNHADAEFQERLQEDTSFGGNLGRAVFQAKKRVLEPLGLVEEGAKTAPGKKRPIDSPDSSTGIGKKGQQPAKKKLNFGQTGDSESVPDPQPLGEPPAAPSSVGSGTMAAGGGAPMADNNEGADGVGNASGNWHCDSTWLGDRVITTSTRTWALPTYNNHLYKQISSSSSGATNDNHYFGYSTPWGYFDFNRFHCHFSPRDWQRLINNNWGFRPKKLRFKLFNIQVKEVTTNDGVTTIANNLTSTVQVFSDSEYQLPYVLGSAHQGCLPPFPADVFMIPQYGYLTLNNGSQSVGRSSFYCLEYFPSQMLRTGNNFEFSYSFEDVPFHSSYAHSQSLDRLMNPLIDQYLYYLARTQSTTGSTRELQFHQAGPNTMAEQSKNWLPGPCYRQQRLSKNLDFNNNSNFAWTAATKYHLNGRNSLTNPGIPMATNKDDEDQFFPINGVLVFGKTGAANKTTLENVLMTSEEEIKTTNPVATEEYGVVSSNLQSSTAGPQSQTINSQGALPGMVWQNRDVYLQGPIWAKIPHTDGNFHPSPLMGGFGLKHPPPQILIKNTPVPANPPEVFTPAKFASFITQYSTGQVSVEIEWELQKENSKRWNPEIQYTSNYAKSNNVEFAVNPDGVYTEPRPIGTRYLTRNL

SEQ ID NO: 4984 - DNA, 2217 bp, Adeno-associated virus
atggctgctgacggttatcttccagattggctcgaggacaacctctctgagggcattcgcgagtggtgggacctgaaacctggagcccccaagcccaaggccaaccagcagaagcaggacgacggccggggtctggtgcttcctggctacaagtacctcggacccttcaacggactcgacaagggggagcccgtcaacgcggcggacgcagcggccctcgagcacgacaaggcctacgaccagcagctcaaagcgggtgacaatccgtacctgcggtataaccacgccgacgccgagtttcaggagcgtctacaagaagatacgtcttttgggggcaacctcgggcgagcagtcttccaggccaagaagcgggttctcgaacctctcggtctggttgaggaagctgctaagacggctcctggaaagaagagaccggtagaaccgtcacctcagcgttcccccgactcctccacgggcatcggcaagaaaggccagcggcccgctaaaaagagactgaactttggtcagactggcgactcagagtcagtccccgaccctcaaccaatcggagaaccaccagcaggcccctctggtctgggatctggtacaatggctgcaggcggtggcgctccaatggcagacaataacgaaggcgccgacggagtgggtagttcctcaggaaattggcattgcgattccacatggctgggcgacagagtcatcaccaccagcacccgaacctgggccctgcccacctacaacaaccacctctacaagcaaatatccaatgggacatcgggaggaagcaccaacgacaacacctacttcggctacagcaccccctgggggtattttgacttcaacagattccactgccacttctcaccacgtgactggcagcgactcatcaacaacaactggggattccggccaaaaagactcagcttcaagcccttcaacatccaggtcaaggaggtcacgcagaatgaaggcaccaagaccatcgccaataaccttaccagcacgattcaggtatttacggactcggaataccagctgccgtacgtcctcggctccgcgcaccagggctgcctgcctccgttcccggcggacgtcttcatgattccccagtacggctaccttacactgaacaatggaagtcaagccgtaggccgttcctccttctactgcctggaatattttccatctcaaatgctgcgaactggaaacaattttgaattcagctacaccttcgaggacgtgcctttccacagcagctacgcacacagccagagcttggaccgactgatgaatcctctcatcgaccagtacctgcactacttatccagaactcagtccacaggaggaactcaaggtacccagcaattgttattttctcaagctgggcctgcaaacatgtcggctcaggctaagaactggctacctggaccttgctaccggcagcagcgagtctctacgacactgtcgcaaaacaacaacagcaactttgcttggactggtgccaccaaatatcacctgaacggaagagactctttggtaaatcccggtgtcgccatggcaacccacaaggacgacgaggaacgcttcttcccgtcgagtggagtcctgatgtttggaaaacagggtgctggaagagacaatgtggactacagcagcgttatgctaaccagcgaagaagaaattaaaaccactaaccctgtagccacagaacaatacggtgtggtggctgacaacttgcagcaaaccaatacagggcctattgtgggaaatgtcaacagccaaggagccttacctggcatggtctggcagaaccgagacgtgtacctgcagggtcccatctgggccaagattcctcacacggacggcaacttccacccttcaccgctaatgggaggatttggactgaagcacccacctcctcagatcctgatcaagaacacgccggtacctgcggatcctccaacaacgttcagccaggcgaaattggcttccttcattacgcagtacagcaccggacaggtcagcgtggaaatcgagtgggagctgcagaaggagaacagcaaacgctggaacccagagattcagtacacttcaaactactacaaatctacaaatgtggactttgctgtcaatacagagggaacttattctgagcctcgccccattggtactcgctacctcacccgtaatctgtaa

SEQ ID NO: 4985 - protein, 738 aa, Adeno-associated virus
MAADGYLPDWLEDNLSEGIREWWDLKPGAPKPKANQQKQDDGRGLVLPGYKYLGPFNGLDKGEPVNAADAAALEHDKAYDQQLKAGDNPYLRYNHADAEFQERLQEDTSFGGNLGRAVFQAKKRVLEPLGLVEEAAKTAPGKKRPVEPSPQRSPDSSTGIGKKGQRPAKKRLNFGQTGDSESVPDPQPIGEPPAGPSGLGSGTMAAGGGAPMADNNEGADGVGSSSGNWHCDSTWLGDRVITTSTRTWALPTYNNHLYKQISNGTSGGSTNDNTYFGYSTPWGYFDFNRFHCHFSPRDWQRLINNNWGFRPKRLSFKPFNIQVKEVTQNEGTKTIANNLTSTIQVFTDSEYQLPYVLGSAHQGCLPPFPADVFMIPQYGYLTLNNGSQAVGRSSFYCLEYFPSQMLRTGNNFEFSYTFEDVPFHSSYAHSQSLDRLMNPLIDQYLHYLSRTQSTGGTQGTQQLLFSQAGPANMSAQAKNWLPGPCYRQQRVSTTLSQNNNSNFAWTGATKYHLNGRDSLVNPGVAMATHKDDEERFFPSSGVLMFGKQGAGRDNVDYSSVMLTSEEEIKTTNPVATEQYGVVADNLQQTNTGPIVGNVNSQGALPGMVWQNRDVYLQGPIWAKIPHTDGNFHPSPLMGGFGLKHPPPQILIKNTPVPADPPTTFSQAKLASFITQYSTGQVSVEIEWELQKENSKRWNPEIQYTSNYYKSTNVDFAVNTEGTYSEPRPIGTRYLTRNL

SEQ ID NO: 4986 - DNA, 2217 bp, Adeno-associated virus
atggctgctgacggttatcttccagattggctcgaggacaacctctctgagggcattcgcgagtggtgggacctgaaacctggagcccccaagcccaaggccaaccagcagaagcaggacgacggccggggtctggtgcttcctggctacaagtacctcggacccttcaacggactcgacaagggggagcccgtcaacgcggcggacgcagcggccctcgagcacgacaaggcctacgaccagcagctcaaagcgggtgacaatccgtacctgcggtataaccacgccgacgccgagtttcaggagcgtctgcaagaagatacgtcttttgggggcaacctcgggcgagcagtcttccaggccaagaagcgggttctcgaacctctcggtctggttgaggaagctgctaagacggctcctggaaagaagagaccggtagaaccgtcacctcagcgttcccccgactcctccacgggcatcggcaagaaaggccagcagcccgctaaaaagagactgaactttggtcagactggcgactcagagtcagtccccgaccctcaaccaatcggagaaccaccagcaggcccctctggtctgggatctggtacaatggctgcaggcggtggcgctccaatggcagacaataacgaaggcgccgacggagtgggtagttcctcaggaaattggcattgcgattccacatggctgggcgacagagtcatcaccaccagcacccgaacctgggccctgcccacctacaacaaccacctctacaagcaaatatccaatgggacatcgggaggaagcaccaacgacaacacctacttcggctacagcaccccctgggggtattttgacttcaacagattccactgccacttctcaccacgtgactggcagcgactcatcaacaacaactggggattccggccaaaaagactcagcttcaagctcttcaacatccaggtcaaggaggtcacgcagaatgaaggcaccaagaccatcgccaataaccttaccagcacgattcaggtatttacggactcggaataccagctgccgtacgtcctcggctccgcgcaccagggctgcctgcctccgttcccggcggacgtcttcatgattccccagtacggctaccttacactgaacaatggaagtcaagccgtaggccgttcctccttctactgcctggaatattttccatctcaaatgctgcgaactggaaacaattttgaattcagctacaccttcgaggacgtgcctttccacagcagctacgcacacagccagagcttggaccgactgatgaatcctctcatcgaccagtacctgtactacttatccagaactcagtccacaggaggaactcaaggtacccagcaattgttattttctcaagctgggcctgcaaacatgtcggctcaggctaagaactggctacctggaccttgctaccggcagcagcgagtctctacgacactgtcgcaaaacaacaacagcaactttgcttggactggtgccaccaaatatcacctgaacggaagagactctttggtaaatcccggtgtcgccatggcaacccacaaggacgacgaggaacgcttcttcccgtcgagtggagtcctgatgtttggaaaacagggtgctggaagagacaatgtggactacagcagcgttatgctaaccagcgaagaagaaattaaaaccactaaccctgtagccacagaacaatacggtgtggtggctgataacttgcagcaaaccaatacggggcctattgtgggaaatgtcaacagccaaggagccttacctggcatggtctggcagaaccgagacgtgtacctgcagggtcccatctgggccaagattcctcacacggacggcaacttccacccttcaccgctaatgggaggatttggactgaagcacccacctcctcagatcctgatcaagaacacgccggtacctgcggatcctccaacaacgttcagccaggcgaaattggcttccttcattacgcagtacagcaccggacaggtcagcgtggaaatcgagtgggagctgcagaaggagaacagcaaacgctggaacccagagattcagtacacttcaaactactacaaatctacaaatgtggactttgctgtcaatacagagggaacttattctgagcctcgccccattggtactcgttacctcacccgtaatctgtaa

SEQ ID NO: 4987 - protein, 738 aa, Adeno-associated virus; identical to SEQ ID NO: 4760

SEQ ID NO: 4988 - protein, 738 aa, Adeno-associated virus
MAADGYLPDWLEDNLSEGIREWWDLKPGAPKPKANQQKQDDGRGLVLPGYKYLGPFNGLDKGEPVNAADAAALEHDKAYDQQLKAGDNPYLRYNHADAEFQERLQEDTSFGGNLGRAVFQAKKRVLEPLGLVEEAAKTAPGKKRPVEPSPQRSPDSSTGIGKKGQQPAKKRLNFGQTGDSESVPDPQPIGEPPAGPSGLGSGTMAAGGGAPMADNNEGADGVGSSSGNWHCDSTWLGDRVITTSTRTWALPTYNNHLYKQISNGTSGGSTNDNTYFGYSTPWGYFDFNRFHCHFSPRDWQRLINNNWGFRPKRLSFKLFNIQVKEVTQDEGTKTIANNLTSTIQVFTDSEYQLPYVLGSAHQGCLPPFPADVFMIPQYGYLTLNNGSQAVGRSSFYCLEYFPSQMLRTGNNFEFSYTFEDVPFHSSYAHSQSLDRLMNPLIDQYLYYLSRTQSTGGTQGTQQLLFSQAGPANMSARAKNWLPGPCYRQQRVSTTLSQNNNSNFAWTGATKYHLNGRDSLVNPGVAMATHKDDEERFFPSSGVLMFGKQGAGRDNVDYSSVMLTSEEEIKTTNPVATEQYGVVADNLQQANTGPIVGNVNSQGALPGMVWQNRDVYLQGPIWAKIPHTDGNFHPSPLMGGFGLKHPPPQILIKNTPVPADPPTTFSQAKLASFITQYSTGQVSVEIEWELQKENSKRWNPEIQYTSNYYKSTNVDFAVNSEGTYSEPRPIGTRYLTRNL

SEQ ID NO: 4989 - DNA, 2217 bp, Adeno-associated virus
atggctgctgacggttatcttccagattggctcgaggacaacctctctgagggcattcgcgagtggtgggacctgaaacctggagcccccaagcccaaggccaaccagcagaagcaggacgacggccggggtctggtgcttcctggctacaagtacctcggacccttcaacggactcgacaagggggagcccgtcaacgcggcggacgcagcggccctcgagcacgacaaggcctacgaccagcagctcaaagcgggtgacaatccgtacctgcggtataaccacgccgacgccgagtttcaggagcgtctgcaagaagatacgtcttttgggggcaacctcgggcgagcagtcttccaggccaagaagcgggttctcgaacctctcggtctggttgaggaagctgctaagacggctcctggaaagaagagaccggtagaaccgtcacctcagcgttcccccgactcctccacgggcatcggcaagaaaggccagcagcccgctaaaaagagactgaactttggtcagactggcgactcagagtcagtccccgaccctcaaccaatcggagaaccaccagcaggcccctctggtctgggatctggtacaatggctgcaggcggtggcgctccaatggcagacaataacgaaggcgccgacggagtgggtagttcctcaggaaattggcattgcgattccacatggctgggcgacagagtcatcaccaccagcacccgaacctgggccctgcccacctacaacaaccacctctacaagcaaatatccaatgggacatcgggaggaagcaccaacgacaacacctacttcggctacagcaccccctgggggtattttgacttcaacagattccactgccacttctcaccacgtgactggcagcgactcatcaacaacaactggggattccggccaaaaagactcagcttcaagctcttcaacatccaggtcaaggaggtcacgcaggatgaaggcaccaagaccatcgccaataaccttaccagcacgattcaggtatttacggactcggaataccagctgccgtacgtcctcggctccgcgcaccagggctgcctgcctccgttcccggcggacgtcttcatgattccccagtacggctaccttacactgaacaatggaagtcaagccgtaggccgttcctccttctactgcctggaatattttccatctcaaatgctgcgaactggaaacaattttgaattcagctacaccttcgaggacgtgcctttccacagcagctacgcacacagccagagcttggaccgactgatgaatcctctcatcgaccagtacctgtactacttatccagaactcagtccacaggaggaactcaaggtacccagcaattgttattttctcaagctgggcctgcaaacatgtcggctcgggctaagaactggctacctggaccttgctaccggcagcagcgagtctctacgacactgtcgcaaaacaacaacagcaactttgcttggactggtgccaccaaatatcacctgaacggaagagactctttggtaaatcccggtgttgctatggcaacgcataaggacgacgaggaacgtttctttccatcgagcggagtcctgatgtttggaaaacagggtgctggaagagacaatgtggactatagcagcgttatgctaaccagcgaggaagaaattaaaaccactaaccctgtagccacagaacaatacggtgtggtggctgacaacttgcagcaagccaatacagggcctattgtgggaaatgtcaacagccaaggagccttacctggcatggtctggcagaaccgagacgtgtacctgcagggtcccatctgggccaaaattcctcacacggacggcaattttcacccgtctcctctgatgggcggctttggactgaagcacccacctccccagatcctgatcaagaatacgccggtacctgcggatcctccaacgacgttcagccaggcaaaattggcttccttcatcacgcagtacagcaccggccaggtcagcgtggagatcgagtgggagctgcagaaggagaacagcaagcgatggaacccagaaattcagtacacttccaactactacaaatctacaaatgtggactttgctgtcaattctgagggtacatattcagagcctcgccccattggtactcgttatctgacacgtaatctgtaa

SEQ ID NO: 4990 - DNA, 2211 bp, Adeno-associated virus
atggctgccgatggttatcttccagattggctcgaggacaacctctctgagggcattcgcgagtggtgggacttgaaacctggagccccgaaacccaaagccaaccagcaaaagcaggacgacggccggggcctggtgcttcctggctacaagtacctcggacccttcaacggactcgacaagggggagcccgtcaacgcggcggacgcagcggccctcgagcacgacaaggcctacgaccagcagctcgaagcgggtgacaatccgtacctgcggtataaccacgccgacgccgagtttcaggagcgtctgcaagaagatacgtcttttgggggcaacctcgggcgagcagtcttccaggccaagaagcgggttctcgaacctctcggtctggttgaggaaggcgctaagacggctcctggaaagaagagaccagtagagcagtcaccccaagaaccagactcctcctcgggcatcggcaagaaaggccaacagcccgccagaaaaagactcaattttggccagactggcgactcagagtcagttccagaccctcaacctctcggagaacctccagcagcgccctctggtgtgggacctaatacaatggctgcaggcggtggcgcaccaatggcagacaataacgaaggcgccgacggagtgggtagttcctcgggaaattggcattgcgattccacatggctgggcgacagagtcatcaccaccagcacccgaacctgggccctgcccacctacaacaaccacctctacaagcaaatctccaacgggacatcgggaggagccaccaacgacaacacctacttcggctacagcaccccctgggggtattttgactttaacagattccactgccacttttcaccacgtgactggcagcgactcatcaacaacaactggggattccggcccaagagactcagcttcaagctcttcaacatccaggtcaaggaggtcacgcagaatgaaggcaccaagaccatcgccaataacctcaccagcaccatccaggtgtttacggactcggagtaccagctgccgtacgttctcggctctgcccaccagggctgcctgcctccgttcccggcggacgtgttcatgattccccagtacggctacctaacactcaacaacggtagtcaggccgtgggacgctcctccttctactgcctggaatactttccttcgcagatgctgagaaccggcaacaacttccagtttacttacaccttcgaggacgtgcctttccacagcagctacgcccacagccagagcttggaccggctgatgaatcctctgattgaccagtacctgtactacttgtctcggactcaaacaacaggaggcacggcaaatacgcagactctgggcttcagccaaggtgggcctaatacaatggccaatcaggcaaagaactggctgccaggaccctgttaccgccaacaacgcgtctcaacgacaaccgggcaaaacaacaatagcaactttgcctggactgctgggaccaaataccatctgaatggaagaaattcattggctaatcctggcatcgctatggcaacacacaaagacgacgaggagcgttttttcccagtaacgggatcctgtttttggcaacaaaatgctgccagagacaatgcggattacagcgatgtcatgctcaccagcgaggaagaaatcaaaaccactaaccctgtggctacagaggaatacggtatcgtggcagataacttgcagcagcaaaacacggctcctcaaattggaactgtcaacagccagggggccttacccggtatggtctggcagaaccgggacgtgtacctgcagggtcccatctgggccaagattcctcacacggacggcaacttccacccgtctccgctgatgggcggctttggcctgaaacatcctccgcctcagatcctgatcaagaacacgcctgtacctgcggatcctccgaccaccttcaaccagtcaaagctgaactctttcatcacgcaatacagcaccggacaggtcagcgtggaaattgaatgggagctacagaaggaaaacagcaagcgctggaaccccgagatccagtacacctccaactactacaaatctacaagtgtggactttgctgttaatacagaaggcgtgtactctgaaccccgccccattggcacccgttacctcacccgtaatctgtaa

SEQ ID NO: 4991 - protein, 736 aa, Adeno-associated virus
MAADGYLPDWLEDNLSEGIREWWDLKPGAPKPKANQQKQDDGRGLVLPGYKYLGPFNGLDKGEPVNAADAAALEHDKAYDQQLEAGDNPYLRYNHADAEFQERLQEDTSFGGNLGRAVFQAKKRVLEPLGLVEEGAKTAPGKKRPVEQSPQEPDSSSGIGKKGQQPARKRLNFGQTGDSESVPDPQPLGEPPAAPSGVGPNTMAAGGGAPMADNNEGADGVGSSSGNWHCDSTWLGDRVITTSTRTWALPTYNNHLYKQISNGTSGGATNDNTYFGYSTPWGYFDFNRFHCHFSPRDWQRLINNNWGFRPKRLSFKLFNIQVKEVTQNEGTKTIANNLTSTIQVFTDSEYQLPYVLGSAHQGCLPPFPADVFMIPQYGYLTLNNGSQAVGRSSFYCLEYFPSQMLRTGNNFQFTYTFEDVPFHSSYAHSQSLDRLMNPLIDQYLYYLSRTQTTGGTANTQTLGFSQGGPNTMANQAKNWLPGPCYRQQRVSTTTGQNNNSNFAWTAGTKYHLNGRNSLANPGIAMATHKDDEERFFPVTGSCFWQQNAARDNADYSDVMLTSEEEIKTTNPVATEEYGIVADNLQQQNTAPQIGTVNSQGALPGMVWQNRDVYLQGPIWAKIPHTDGNFHPSPLMGGFGLKHPPPQILIKNTPVPADPPTTFNQSKLNSFITQYSTGQVSVEIEWELQKENSKRWNPEIQYTSNYYKSTSVDFAVNTEGVYSEPRPIGTRYLTRNL

SEQ ID NO: 4992 - DNA, 2214 bp, Adeno-associated virus
atggctgctgacggttatcttccagattggctcgaggacaacctctctgagggcattcgcgagtggtgggacctgaaacctggagcccccaagcccaaggccaaccagcagaagcaggacgacggccggggtctggtgcttcctggctacaagtacctcggacccttcaacggactcgacaagggggagcccgtcagcgcggcggacgcagcggccctcgagcacgacaaggcctgcgaccagcggctcaaagcgggtgacaatccgtacctgcggtataaccacgccgacgccgagtttcaggagcgtctgcaagaagatacgtcttttgggggcaacctcgggcgagcagtcttccaggccaagaagcgggttctcgaacctctcggtctggttgaggaagctgctaagacggctcctggaaagaagggaccggtagaaccgtcacctcagcgttcccccgactcctccacgggcatcggcaagaaaggccagcagcccgctagaaagagactgaactttgggcagactggcgactcagagtcagtccccgaccctcaaccaatcggagaaccaccagcaggcccctctggtctgggatctggtacaatggctgcaggcggtggcgcaccaatggctgacaataacgagggcgccgacggagtgggtaatgcctcaggaaattggcattgcgattccacatggctgggcgacagagtcatcaccaccagcacccgaacctgggctttgcccacctacaacaatcacctctacaagcaaatctccagtcagtcagcaggtagcaccaacgacaacgtctacttcggctacagcaccccctgggggtattttgacttcaacagattccactgtcacttctcaccacgtgactggcagcggctcatcaacaacaactggggattccggcccaagaagctcaacttcaagctgttcaacatccaggtcaaggaggtcacaacgaatgacggcgtcacgaccatcgccaataaccttaccagcacggttcaggtcttttcggactcggaataccagctgccctacgtcctcggctccgcacaccagggctgcctgcctccgttcccggcggacgtcttcatgattccccagtacggctacctgactctgaacaatggcagccaatcggtgggtcgttcctctttctactgcctggaatatttcccttctcaaatgctgagaacgggcaacaacttcaccttcagctacaccttcgaggacgttcccttccacagcagctacgcacacagccagagcctggaccggctgatgaatcctcttatcgaccagtacctgtattacctggccagaacacagagcaacgcaggaggcacagctggcaatcgggaactgcagttttatcagggcgggcctaccaccatggccgaacaagccaaaaactggctgcctggaccttgcttccggcaacaaagagtctccaagacgctggatcaaaacaacaacagcaactttgcttggactggtgccaccaaataccatctaaatggaagaaattcattggttaatcccggtgtcgccatggcaacccacaaggacgacgaggaacgcttcttcccttcgagcggagtcctgatttttggaaaaactggagcagctaataagactacactggaaaatgtgttaatgacaaatgaagaggaaattcgtcctaccaacccggtagccaccgaggaatacgggactgttagcagcaacctgcaggcggctaacactgcagcccagacacaagttgtcaacaaccagggagccttacctggtatggtctggcagaaccgggacgtgtacctgcagggtcccatctgggccaagattcctcacacggacggcaactttcacccgtctccgctgatgggcggctttggactgaagcatccgcctcctcagatcctgatcaaaaacactcctgttcctgctaatcccccggaggtgtttacgcctgccaagtttgcttctttcatcacacagtacagcaccggccaggtcagcgtggagatcgagtgggagctgcagaaggagaacagcaagcgctggaacccagagattcagtatacctccaattttgacgaacagactggtgtggactttgccgttgacagccagggtgtttattctgagcctcgccccattggtactcgttacctcacccgtaatctgtaa

SEQ ID NO: 4993 - protein, 737 aa, Adeno-associated virus
MAADGYLPDWLEDNLSEGIREWWDLKPGAPKPKANQQKQDDGRGLVLPGYKYLGPFNGLDKGEPVSAADAAALEHDKACDQRLKAGDNPYLRYNHADAEFQERLQEDTSFGGNLGRAVFQAKKRVLEPLGLVEEAAKTAPGKKGPVEPSPQRSPDSSTGIGKKGQQPARKRLNFGQTGDSESVPDPQPIGEPPAGPSGLGSGTMAAGGGAPMADNNEGADGVGNASGNWHCDSTWLGDRVITTSTRTWALPTYNNHLYKQISSQSAGSTNDNVYFGYSTPWGYFDFNRFHCHFSPRDWQRLINNNWGFRPKKLNFKLFNIQVKEVTTNDGVTTIANNLTSTVQVFSDSEYQLPYVLGSAHQGCLPPFPADVFMIPQYGYLTLNNGSQSVGRSSFYCLEYFPSQMLRTGNNFTFSYTFEDVPFHSSYAHSQSLDRLMNPLIDQYLYYLARTQSNAGGTAGNRELQFYQGGPTTMAEQAKNWLPGPCFRQQRVSKTLDQNNNSNFAWTGATKYHLNGRNSLVNPGVAMATHKDDEERFFPSSGVLIFGKTGAANKTTLENVLMTNEEEIRPTNPVATEEYGTVSSNLQAANTAAQTQVVNNQGALPGMVWQNRDVYLQGPIWAKIPHTDGNFHPSPLMGGFGLKHPPPQILIKNTPVPANPPEVFTPAKFASFITQYSTGQVSVEIEWELQKENSKRWNPEIQYTSNFDEQTGVDFAVDSQGVYSEPRPIGTRYLTRNL

SEQ ID NO: 4994 - DNA, 2214 bp, Adeno-associated virus
atggctgccgatggttatcttccagattggctcgaggacaacctctctgagggcattcgcgagtggtgggacctgaaacctggagccccgaaacccaaagccaaccagcaaaagcaggacgacggccggggtctggtgcttcctggctacaagtacctcggacccttcaacggactcgacaagggggagcccgtcaacgcggcggacgcagcggccctcgagcacgacaaggcctacgaccagcagctcaaagcgggtgacaatccgtacctgcggtataaccacgccgacgccgagtttcaggagcgtctgcaagaagatacgtcttttgggggcaacctcgggcgagcagtcttccaggccaagaagcgggttctcgaacctctcggtctggttgaggaagctgctaagacggctcctggaaagaagagaccggtagaaccgtcacctcagcgttcccccgactcctccacgggcatcggcaagaaaggccagcagcccgctagaaagagactgaactttgggcagactggcgactcagagtcagtccccgaccctcaaccaatcggagaaccaccagcaggcccctctggtctgggatctggtacaatggctgcaggcggtggcgctccaatggcagacaataacgaaggcgccgacggagtgggtaatgcctcaggaaattggcattgcgattccacatggctgggcgacagagtcatcaccaccagcacccgaacctgggctttgcccacctacaacaaccacctctacaagcaaatctccagtcagtcagcaggtagcaccaacgacaacgtctacttcggctacagcaccccctgggggtattttgacttcaacagattccactgtcacttctcaccacgtgactggcagcggctcatcaacaacaactggggattccggcccaagaagctcaacttcaagctgttcaacatccaggtcaaggaggtcacaacgaatgacggcgtcacgaccatcgccaataaccttaccagcacggttcaggtcttttcggactcggaataccagctgccctacgtcctcggctccgcacaccagggctgcctgcctccgttcccggcggacgtcttcatgattcctcagtacggctacctgactctcaacaacggtagtcaggccgtgggacgttcctccttctactgcctggagtacttcccctctcagatgctgagaacgggcaacaacttttccttcagctacactttcgaggacgtgcctttccacagcagctacgcgcacagccagagtttggacaggctgatgaatcctctcatcgaccagtacctgtactacctgtcaagaacccagtctacgggaggcacagcgggaacccagcagttgctgttttctcaggccgggcctagcaacatgtcgactcaggccagaaactggctgcctggaccctgctacagacagcagcgcgtctccacgacactgtcgcaaaacaacaacagcaactttgcctggactggtgccaccaagtatcatctgaacggcagagactctctggtgaatccgggcgtcgccatggcaaccaacaaggacgacgaggaccgcttcttcccatccagcggcatcctcatgtttggcaagcagggagctggaaaagacaacgtggactatagcaacgtgatgctaaccagcgaggaagaaatcaagaccaccaaccccgtggccacagaacagtatggcgtggtggctgataacctacagcagcaaaacaccgctcctattgtgggggccgtcaacagccagggagccttacctggcatggtctggcagaaccgggacgtgtacctgcagggtcctatttgggccaagattcctcacacagatggcaactttcacccgtctcctttaatgggcggctttggacttaaacatccgcctcctcagatccttatcaaaaacactcctgttcctgcggatcctccaacagcgttcaaccaggccaagctgaattctttcatcacgcagtacagcaccggacaagtcagcgtggagatcgagtgggagctgcagaaggagaacagcaagcgctggaacccagagattcagtatacttccaactactacaaatctacaaatgtggactttgctgttaatactgagggtgcttactctgagcctcgccccattggcactcgttacctcacccgtaatctgtaa

SEQ ID NO: 4995 - protein, 737 aa, Adeno-associated virus
MAADGYLPDWLEDNLSEGIREWWDLKPGAPKPKANQQKQDDGRGLVLPGYKYLGPFNGLDKGEPVNAADAAALEHDKAYDQQLKAGDNPYLRYNHADAEFQERLQEDTSFGGNLGRAVFQAKKRVLEPLGLVEEAAKTAPGKKRPVEPSPQRSPDSSTGIGKKGQQPARKRLNFGQTGDSESVPDPQPIGEPPAGPSGLGSGTMAAGGGAPMADNNEGADGVGNASGNWHCDSTWLGDRVITTSTRTWALPTYNNHLYKQISSQSAGSTNDNVYFGYSTPWGYFDFNRFHCHFSPRDWQRLINNNWGFRPKKLNFKLFNIQVKEVTTNDGVTTIANNLTSTVQVFSDSEYQLPYVLGSAHQGCLPPFPADVFMIPQYGYLTLNNGSQAVGRSSFYCLEYFPSQMLRTGNNFSFSYTFEDVPFHSSYAHSQSLDRLMNPLIDQYLYYLSRTQSTGGTAGTQQLLFSQAGPSNMSTQARNWLPGPCYRQQRVSTTLSQNNNSNFAWTGATKYHLNGRDSLVNPGVAMATNKDDEDRFFPSSGILMFGKQGAGKDNVDYSNVMLTSEEEIKTTNPVATEQYGVVADNLQQQNTAPIVGAVNSQGALPGMVWQNRDVYLQGPIWAKIPHTDGNFHPSPLMGGFGLKHPPPQILIKNTPVPADPPTAFNQAKLNSFITQYSTGQVSVEIEWELQKENSKRWNPEIQYTSNYYKSTNVDFAVNTEGAYSEPRPIGTRYLTRNL

SEQ ID NO: 4996 - DNA, 2217 bp, Adeno-associated virus
atggctgccgatggttatcttccagattggctcgaggacaacctctctgagggcattcgcgagtggtgggacctgaaacctggagccccgaaacccaaagccaaccagcaaaagcaggacgacggccggggtctggtgcttcctggctacaagtacctcggacccttcaacggactcgacaagggggagcccgtcaacgcggcggacgcagcggccctcgagcacgacaaggcctacgaccagcagctcaaagcgggtgacaatccgtacctgcggtataatcacgccgacgccgagtttcaggagcgtctgcaagaagatacgtcttttgggggcaacctcgggcgagcagtcttccaggccaagaagcgggttctcgaacctctcggtctggttgaggaaggcgctaagacggctcctggaaagaagagaccggtagagccgtcaccacagcgttcccccgactcctccacgggcatcggcaagaaaggccagcagcccgccagaaagagactcaatttcggtcagactggcgactcagagtcagtccccgaccctcaacctatcggagaacctccagcagcgccctctagtgtgggatctggtacaatggctgcaggcggtggcgcaccaatggcagacaataacgaaggtgccgacggagtgggtagttcctcgggaaattggcattgcgattccacatggctgggcgacagagtcatcaccaccagcacccgaacctgggccctgcccacctacaacaaccacctctacaagcaaatctccaacgggacctcgggaggcagcaccaacgacaacacctactttggctacagcaccccctgggggtattttgactttaacagattccactgccacttctcaccacgtgactggcagcgactcatcaacaacaactggggattccggcccaagagactcagcttcaagctcttcaacatccaggtcaaagaggtcacgcagaatgaaggcaccaagaccatcgccaataacctcaccagcaccatccaggtgtttacggactcggaataccagctgccgtacgtcctcggctctgcccaccagggctgcctgcctccgttcccggcggacgtcttcatgattcctcagtacggctacctgactctcaacaacggtagtcaggccgtgggacgttcctccttctactgcctggagtacttcccctctcagatgctgagaacgggcaacaacttttccttcagctacactttcgaggacgtgcctttccacagcagctacgcgcacagccagagtttggacaggctgatgaatcctctcatcgaccagtacctgtactacctgtcaagaacccagtctacgggaggcacagcgggaacccagcagttgctgttttctcaggccgggcctagcaacatgtcggctcaggccagaaactggctgcctggaccctgctacagacagcagcgcgtctccacgacactgtcgcaaaacaacaacagcaactttgcctggactggtgccaccaagtatcatctgaacggcagagactctctggtgaatccgggcgtcgccatggcaaccaacaaggacgacgaggaccgcttcttcccatccagcggcatcctcatgtttggcaagcagggagctggaaaagacaacgtggactatagcaacgtgatgctaaccagcgaggaagaaatcaaggccaccaaccccgtggccacagaacagtatggcgtggtggctgataacctacagcagcaaaacaccgctcctattgtgggggccgtcaacagccagggagccttacctggcatggtctggcagaaccgggacgtgtacctgcagggtcctatttgggccaagattcctcacacagatggcaactttcacccgtctcctttaatgggcggctttggacttaaacatccgcctcctcagatcctcatcaaaaacactcctgttcctgcggatcctccaacagcgttcaaccaggccaagctgaattctttcatcacgcagtacagcaccggacaagtcagcgtggagatcgagtgggagctgcagaaggagaacagcaagcgctggaacccagagattcagtatacttccaactactacaaatctacaaatgtggactttgctgttaatactgagggtgtttactctgagcctcgccccattggcactcgttacctcacccgtaatctgtaa

SEQ ID NO: 4997 - protein, 738 aa, Adeno-associated virus
MAADGYLPDWLEDNLSEGIREWWDLKPGAPKPKANQQKQDDGRGLVLPGYKYLGPFNGLDKGEPVNAADAAALEHDKAYDQQLKAGDNPYLRYNHADAEFQERLQEDTSFGGNLGRAVFQAKKRVLEPLGLVEEGAKTAPGKKRPVEPSPQRSPDSSTGIGKKGQQPARKRLNFGQTGDSESVPDPQPIGEPPAAPSSVGSGTMAAGGGAPMADNNEGADGVGSSSGNWHCDSTWLGDRVITTSTRTWALPTYNNHLYKQISNGTSGGSTNDNTYFGYSTPWGYFDFNRFHCHFSPRDWQRLINNNWGFRPKRLSFKLFNIQVKEVTQNEGTKTIANNLTSTIQVFTDSEYQLPYVLGSAHQGCLPPFPADVFMIPQYGYLTLNNGSQAVGRSSFYCLEYFPSQMLRTGNNFSFSYTFEDVPFHSSYAHSQSLDRLMNPLIDQYLYYLSRTQSTGGTAGTQQLLFSQAGPSNMSAQARNWLPGPCYRQQRVSTTLSQNNNSNFAWTGATKYHLNGRDSLVNPGVAMATNKDDEDRFFPSSGILMFGKQGAGKDNVDYSNVMLTSEEEIKATNPVATEQYGVVADNLQQQNTAPIVGAVNSQGALPGMVWQNRDVYLQGPIWAKIPHTDGNFHPSPLMGGFGLKHPPPQILIKNTPVPADPPTAFNQAKLNSFITQYSTGQVSVEIEWELQKENSKRWNPEIQYTSNYYKSTNVDFAVNTEGVYSEPRPIGTRYLTRNL

SEQ ID NO: 4998 - DNA, 2217 bp, Adeno-associated virus
atggctgccgatggttatcttccagattggctcgaggacaacctctctgagggcattcgcgagtggtgggacctgaaacctggagccccgaaacccaaagccaaccagcaaaagcaggacgacggccggggtctggtgcttcctggctacaagcacctcggacccttcaacggactcgacaagggggagcccgtcaacgcggcggacgcagcggccctcgagcacgacaaggcctacgaccagcagctcaaagcgggtgacaatccgtacctgcggtataatcacgctgacgccgagtttcaggagcgtctgcaagaagatacgtcttttgggggcaacctcgggcgagcagtcttccaggccaagaagcgggttctcgaacctctcggtctggttgaggaaggcgctaagacggctcctggaaagaagagaccggtagagccgtcaccacagcgttcccccgactcctccacgggcatcggcaagaaaggccagcagcccgccagaaagagactcaatttcggtcagactggcgactcagagtcagtccccgaccctcaacctatcggagaacctccagcagcgccctctagtgtgggatctggtacaatggctgcaggcggtggcgcaccaatggcagacaataacgaaggtgccgacggagtgggtagttcctcgggaaattggcattgcgattccacatggctgggcgacagagtcatcaccaccagcacccgaacctgggccctgcccacctacaacaaccacctctacaagcaaatctccaacgggacctcgggaggcagcaccaacgacaacacctactttggctacagcaccccctgggggtattttgactttaacagattccactgccacttctcaccacgtgactggcagcgactcatcaacaacaactggggattccggcccaagagactcagcttcaagctcttcaacatccaggtcaaagaggtcacgcagaatgaaggcaccaagaccatcgccaataaccttaccagcacggttcaggtcttttcggactcggaataccagctgccctacgtcctcggctccgcacaccagggctgcctgcctccgttcccggcggacgtcttcatgattccccagtacggctacctgactctgaacaatggcagccaatcggtgggtcgttcctctttctactgcctggaatatttcccttctcaaatgctgagaacgggcaacaacttcaccttcagctacaccttcgaggacgttcccttccacagcagctacgcacacagccagagcctggaccggctgatgaatcctcttatcgaccagtacctgtattacctggccagaacacagagcaacgcaggaggcacagctggcaatcgggaactgcagttttatcagggcgggcctaccaccatggccgaacaagccaaaaactggctgcctggaccttgcttccggcaacaaagagtctccaagacgctggatcaaaacaacaacagcaactttgcttggactggtgccaccaaataccatctaaatggaagaaattcattggttaatcccggtgtcgccatggcaacccacaaggacgacgaggaacgcttcttcccttcgagcggagtcctgatttttggaaaaactggagcagctaataagactacactggaaaatgtgttaatgacaaatgaagaggaaattcgtcctaccaacccggtagccaccgaggaatacgggactgttagcagcaacctgcaggcggctaacactgcagcccagacacaagttgtcaacaaccagggagccttacctggtatggtctggcagaaccgggacgtgtacctgcagggtcccatctgggccaagattcctcacacggacggcaactttcacccgtctccgctgatgggcggctttggactgaagcatccgcctcctcagatcctgatcaaaaacactcctgttcctgctaatcccccggaggtgtttacgcctgccaagtttgcttctttcatcacacagtacagcaccggccaggtcagcgtggagatcgagtgggagctgcagaaggagaacagcaagcgctggaacccagagattcagtatacctccaattttgacaaacagactggtgtggactttgccgttgacagccagggtgtttattctgagcctcgccccattggtactcgttacctcacccgtaatctgtaa

SEQ ID NO: 4999 - protein, 738 aa, Adeno-associated virus
MAADGYLPDWLEDNLSEGIREWWDLKPGAPKPKANQQKQDDGRGLVLPGYKHLGPFNGLDKGEPVNAADAAALEHDKAYDQQLKAGDNPYLRYNHADAEFQERLQEDTSFGGNLGRAVFQAKKRVLEPLGLVEEGAKTAPGKKRPVEPSPQRSPDSSTGIGKKGQQPARKRLNFGQTGDSESVPDPQPIGEPPAAPSSVGSGTMAAGGGAPMADNNEGADGVGSSSGNWHCDSTWLGDRVITTSTRTWALPTYNNHLYKQISNGTSGGSTNDNTYFGYSTPWGYFDFNRFHCHFSPRDWQRLINNNWGFRPKRLSFKLFNIQVKEVTQNEGTKTIANNLTSTVQVFSDSEYQLPYVLGSAHQGCLPPFPADVFMIPQYGYLTLNNGSQSVGRSSFYCLEYFPSQMLRTGNNFTFSYTFEDVPFHSSYAHSQSLDRLMNPLIDQYLYYLARTQSNAGGTAGNRELQFYQGGPTTMAEQAKNWLPGPCFRQQRVSKTLDQNNNSNFAWTGATKYHLNGRNSLVNPGVAMATHKDDEERFFPSSGVLIFGKTGAANKTTLENVLMTNEEEIRPTNPVATEEYGTVSSNLQAANTAAQTQVVNNQGALPGMVWQNRDVYLQGPIWAKIPHTDGNFHPSPLMGGFGLKHPPPQILIKNTPVPANPPEVFTPAKFASFITQYSTGQVSVEIEWELQKENSKRWNPEIQYTSNFDKQTGVDFAVDSQGVYSEPRPIGTRYLTRNL

SEQ ID NO: 5000 - protein, 737 aa, Adeno-associated virus
MAADGYLPDWLEDNLSEGIREWWDLKPGAPKPKANQQKQDDGRGLVLPGYKYLGPFNGLDKGEPVNAADAAALEHDKAYDQQLKAGDNPYLRYNHADAEFQERLQEDTSFGGNLGRAVFQAKKRVLEPLGLVEEAAKTAPGKKRPVEPSPQRSPDSSTGIGKKGQQPARKRLNFGQTGDSESVPDPQPIGEPPAGPSGLGSGTMAAGGGAPMADNNKGADGVGNASGNWHCDSTWLGDRVITTSTRTWALPTYNNHLYKQISSQSAGSTNDNVYFGYSTPWGYFDFNRFHCHFSPRDWQRLINSNWGFRPKKLNFKLFNIQVKEVTTNDGVTTIANNLTSTVQVFSDSEYQLPYVLGSAHQGCLPPFPADVFMIPQYGYLTLNNGSQSVGRSSFYCLEYFPSQMLRTGNNFTFSYTFEDVPFHSSYAHSQSLDRLMNPLIDQYLYYLARTQSNAGGTAGNRELQFYQGGPTTMAEQAKNWLPGPCFRQQRVSKTLDQNNNSNFAWTGATKYHLNGRNSLVNPGVAMATHKDDEERFFPSSGVLIFGKTGAANKTTLENVLMTNEEEIRPTNPVATEEYGTVSSNLQAANTAAQTQVVNNQGALPGMVWQNRDVYLQGPIWAKIPHTDGNFHPSPLMGGFGLKHPPPQILIKNTPVPANPPEVFTPAKFASFITQYSTGQVSVEIEWELQKENSKRWNPEIQYTSNFDKQTGVDFAVDSQGVYSEPRPIGTRYLTRNL

SEQ ID NO: 5001 - DNA, 2214 bp, Adeno-associated virus
atggctgctgacggttatcttccagattggctcgaggacaacctctctgagggcattcgcgagtggtgggacctgaaacctggagcccccaagcccaaggccaaccagcagaagcaggacgacggccggggtctggtgcttcctggctacaagtacctcggacccttcaacggactcgacaagggggagcccgtcaacgcggcggacgcagcggccctcgagcacgacaaggcctacgaccagcagctcaaagcgggtgacaatccgtacctgcggtataaccacgccgacgccgagtttcaggagcgtctgcaagaagatacgtcttttgggggcaacctcgggcgagcagtcttccaggccaagaagcgggttctcgaacctctcggtctggttgaggaagctgctaagacggctcctggaaagaagagaccggtagaaccgtcacctcagcgttcccccgactcctccacgggcatcggcaagaaaggccagcagcccgctagaaagagactgaactttgggcagactggcgactcagagtcagtccccgaccctcaaccaatcggagaaccaccagcaggcccctctggtctgggatctggtacaatggctgcaggcggtggcgcaccaatggctgacaataacaagggcgccgacggagtgggtaatgcctcaggaaattggcattgcgattccacatggctgggcgacagagtcatcaccaccagcacccgaacctgggctttgcccacctacaacaaccacctctacaagcaaatctccagtcagtcagcaggtagcaccaacgacaacgtctacttcggctacagcaccccctgggggtattttgacttcaacagattccactgtcacttctcaccacgtgactggcagcggctcatcaacagcaactggggattccggcccaagaagctcaacttcaagctgttcaacatccaggtcaaggaggtcacaacgaatgacggcgtcacgaccatcgccaataaccttaccagcacggttcaggtcttttcggactcggaataccagctgccctacgtcctcggctccgcacaccagggctgcctgcctccgttcccggcggacgtcttcatgattccccagtacggctacctgactctgaacaatggcagccaatcggtgggtcgttcctctttctactgcctggaatatttcccttctcaaatgctgagaacgggcaacaacttcaccttcagctacaccttcgaggacgttcccttccacagcagctacgcacacagccagagcctggaccggctgatgaatcctcttatcgaccagtacctgtattacctggccagaacacagagcaacgcaggaggcacagctggcaatcgggaactgcagttttatcagggcgggcctaccaccatggccgaacaagccaaaaactggctgcctggaccttgcttccggcaacaaagagtctccaagacgctggatcaaaacaacaacagcaactttgcttggactggtgccaccaaataccatctaaatggaagaaattcattggttaatcccggtgtcgccatggcaacccacaaggacgacgaggaacgcttcttcccttcgagcggagtcctgatttttggaaaaactggagcagctaataagactacactggaaaatgtgttaatgacaaatgaagaggaaattcgtcctaccaacccggtagccaccgaggaatacgggactgttagcagcaacctgcaggcggctaacactgcagcccagacacaagttgtcaacaaccagggagccttacctggtatggtctggcagaaccgggacgtgtacctgcagggtcccatctgggccaagattcctcacacggacggcaactttcacccgtctccgctgatgggcggctttggactgaagcatccgcctcctcagatcctgatcaaaaacactcctgttcctgctaatcccccggaggtgtttacgcctgccaagtttgcttctttcatcacacagtacagcaccggccaggtcagcgtggagatcgagtgggagctgcagaaggagaacagcaagcgctggaacccagagattcagtatacctccaattttgacaaacagactggtgtggactttgccgttgacagccagggtgtttattctgagcctcgccccattggtactcgttacctcacccgtaatctgtaa

SEQ ID NO: 5002 - protein, 737 aa, Adeno-associated virus
MAADGYLPDWLEDNLSEGIREWWDLKPGAPKPKANQQKQDDGRGLVLPGYKYLGPFNGLDKGEPVNAADAAALEHDKAYDQQLKAGDNPYLRYNHADAEFQERLQEDTSFGGNLGRAVFQAKKRVLEPLGLVEEAAKTAPGKKRPVEPSPQRSPDSSTGIGKKGQQPARKRLNFGQTGDSESVPDPQPIGEPPAGPSGLGSGTMAAGGGAPMADNNEGADGVGNASGNWHCDSTWLGDRVITTSTRTWALPTYNNHLYKQISSQSAGSTNDNVYFGYSTPWGYFDFNRFHCHFSPRDWQRLINSNWGFRPKKLNFKLFNIQVKEVTTNDGVTTIANNLTSTVQVFSDSEYQLPYVLGSAHQGCLPPFPADVFMIPQYGYLTLNNGSQSVGRSSFYCLEYFPSQMLRTGNNFTFSYTFEDVPFHSSYAHSQSLDRLMNPLIDQYLYYLARTQSNAGGTAGNRELQFYQGGPTTMAEQAKNWLPGPCFRQQRVSKTLDQNNNSNFAWTGATKYHLNGRNSLVNPGVAMATHKDDEERFFPSSGVLIFGKTGAANKTTLENVLMTNEEEIRPTNPVATEEYGTVSSNLQAANTAAQTQVVNNQGALPGMVWQNRDVYLQGPIWAKIPHTDGNFHPSPLMGGFGLKHPPPQILIKNTPVPANPPEVFTPAKFASFITQYSTGQVSVEIEWELQKENSKRWNPEIQYTSNFDKQTGVDFAVDSQGVYSEPRPIGTRYLTRNL

SEQ ID NO: 5003 - protein, 737 aa, Adeno-associated virus
MAADGYLPDWLEDNLSEGIREWWDLKPGAPKPKANQQKQDDGRGLVLPGYKYLGPFNGLDKGEPVNAADAAALEHDKAYDQQLKAGDNPYLRYNHADAEFQERLQEDTSFGGNLGRAVFQAKKRVLEPLGLVEEAAKTAPGKKRPVEPSPQRSPDSSTGIGKKGQQPARKRLNFGQTGDSESVPDPQPIGEPPAGPSGLGSGTMAAGGGAPMADNNEGADGVGNASGNWHCDSTWLGDRVITTSTRTWALPTYNNHLYKQISSQSAGSTNDNVYFGYSTPWGYFDFNRFHCHFSPRDWQRLINNNWGFRPKKLNFKLFNIQVKEVTTNDGVTTIANNLTSTVQVFSDSEYQLPYVLGSAHQGCLPPFPADVFMIPQYGYLTLNNGSQSVGRSSFYCLEYFPSQMLRTGNNFTFSYTFEDVPFHSSYAHSQSLDRLMNPLIDQYLYYLARTQSNAGGTAGNRELQFYQGGPTTMAEQAKNWLPGPCFRQQRVSKTLDQNNNSNFAWTGATKYHLNGRNSLVNPGVAMATHKDDEERFFPSSGVLIFGKTGAANKTTLENVLMTNEEEIRPTNPVATEEYGTVSSNLQAANTAAQTQVVNNQGALPGMVWQNRDVYLQGPIWAKIPHTDGNFHPSPLMGGFGLKHPPPQILIKNTPVPANPPEVFTPAKFASFITQYSTGQVSVEIEWELQKENSKRWNPEIQYTSNFDKQTGVDFAVDSQGVYSEPRPIGTRYLTRNL

SEQ ID NO: 5004 - protein, 737 aa, Adeno-associated virus
MAADGYLPDWLEDNLSEGIREWWDLKPGAPKPKANQQKQDDGRGLVLPGYKYLGPFNGLDKGEPVNAADAAALEHDKAYDQQLKAGDNPYLRYNHADAEFQERLQEDTSFGGNLGRAVFQAKKRVLEPLGLVEEAAKTAPGKKRPVEPSPQRSPDSSTGIGKKGQQPARKRLNFGQTGDSESVPDPQPIGEPPAGPSGLGSGTMAAGGGAPMADNNKGADGVGNASGNWHCDSTWLGDRVITTSTRTWALPTYNNHLYKQISSQSAGSTNDNVYFGYSTPWGYFDFNRFHCHFSPRDWQRLINNNWGFRPKKLNFKLFNIQVKEVTTNDGVTTIANNLTSTVQVFSDSEYQLPYVLGSAHQGCLPPFPADVFMIPQYGYLTLNNGSQSVGRSSFYCLEYFPSQMLRTGNNFTFSYTFEDVPFHSSYAHSQSLDRLMNPLIDQYLYYLARTQSNAGGTAGNRELQFYQGGPTTMAEQAKNWLPGPCFRQQRVSKTLDQNNNSNFAWTGATKYHLNGRNSLVNPGVAMATHKDDEERFFPSSGVLIFGKTGAANKTTLENVLMTNEEEIRPTNPVATEEYGTVSSNLQAANTAAQTQVVNNQGALPGMVWQNRDVYLQGPIWAKIPHTDGNFHPSPLMGGFGLKHPPPQILIKNTPVPANPPEVFTPAKFASFITQYSTGQVSVEIEWELQKENSKRWNPEIQYTSNFDKQTGVDFAVDSQGVYSEPRPIGTRYLTRNL

SEQ ID NO: 5005 - DNA, 2217 bp, Adeno-associated virus
atggctgccgatggttatcttccagattggctcgaggacaacctctctgagggcattcgcgagtggtgggacctgaaacctggagccccgaaacccaaagccaaccagcaaaagcaggacgacggccggggtctggtgcttcctggctacaagtacctcggacccttcaacggactcgacaagggggagcccgtcaacgcggcggacgcagcggccctcgagcacgacaaggcctacgaccagcagctcaaagcgggtgacaatccgcacctgcggtataatcacgccgacgccgagtttcaggagcgtctgcaagaagatacgtcttttgggggcaacctcgggcgagcagtcttccaggccaagaagcgggttctcgaacctctcggtctggttgaggaaggcgctaagacggctcctggaaagaagagaccggtagagccgtcaccacagcgttcccccgactcctccacgggcatcggcaagaaaggccagcagcccgccagaaagagactcaatttcggtcagactggcgactcagagtcagtccccgaccctcaacttatcggagaacctccagcagcgccctctagtgtgggatctggtacaatggctgcaggcggtggcgcaccaatggcagacaataacgaaggtgccgacggagtgggtagttcctcgggaaattggcattgcgattccacatggctgggcgacagagtcatcaccaccagcacccgaacctgggccctgcccacctacaacaaccacctctacaagcaaatctccaacgggacctcgggaggcagcaccaacgacaacacctactttggctacagcaccccctgggggtattttgactttaacagattccactgccacttctcaccacgtgactggcagcgactcatcaacaacaactggggattccggcccaagagactcagcttcaagctcttcaacatccaggtcaaagaggtcacgcagaatgaaggcaccaagaccatcgccaataacctcaccagcaccatccaggtgtttacggactcggagtaccagctgccgtacgtcctcggctctgcccaccagggctgcctgcctccgttcccggcggacgtcttcatgattcctcagtacggcaacctgactctcaacaacggtagtcaggccgtgggacgttcctccttctactgcctggagtacttcccctctcagatgctgagaacgggcaacaacttttccttcagctacactttcgaggacgtgcctttccacagcagctacgcgcacagccagagtttggacaggctgatgaatcctctcatcgaccagtacctgtactacctgtcaagaacccagtctacgggaggcacagcgggaacccagcagttgctgttttctcaggccgggcctagcaacatgtcggctcaggccagaaactggctgcctggaccctgctacagacagcagcgcgtctccacgacactgtcgcaaaacaacaacagcaactttgcctggactggtgccaccaagtatcatctgaacggcagagactctctggtgaatccgggcgtcgccatggcaaccaacaaggacgacgaggaccgcttcttcccatccagcggcatcctcatgtttggcaagcagggagctggaaaagacaacatgggctatagcaacgtgatgctaaccagcgaggaagaaatcaagaccaccaaccccgtggccacagaacagtatggcgtggtggctgataacctacagcagcaaaacaccgctcctattgtgggggccgtcaacagccagggagccttacctggcatggtctggcagaaccgggacgtgtacctgcagggtcctatttgggccaagattcctcacacagatggcaactttcacccgtctcctttaatgggcggctttggacttaaacatccgcctcctcagatcctcatcaaaaacactcctgttcctgcggatcctccaacagcgttcaaccaggccaagctgaattctttcatcacgcagtacggcaccggacaagtcagcgtggagatcgagtgggagctgcagaaggagaacagcaagcgctggaacccagagattcagtatacttccaactactacaaatctacaaatgtggactttgctgttaatactgagggtgtttactctgagcctcgccccattggcactcgttacctcacccgtaatctgtaa

SEQ ID NO: 5006 - protein, 738 aa, Adeno-associated virus
MAADGYLPDWLEDNLSEGIREWWDLKPGAPKPKANQQKQDDGRGLVLPGYKYLGPFNGLDKGEPVNAADAAALEHDKAYDQQLKAGDNPHLRYNHADAEFQERLQEDTSFGGNLGRAVFQAKKRVLEPLGLVEEGAKTAPGKKRPVEPSPQRSPDSSTGIGKKGQQPARKRLNFGQTGDSESVPDPQLIGEPPAAPSSVGSGTMAAGGGAPMADNNEGADGVGSSSGNWHCDSTWLGDRVITTSTRTWALPTYNNHLYKQISNGTSGGSTNDNTYFGYSTPWGYFDFNRFHCHFSPRDWQRLINNNWGFRPKRLSFKLFNIQVKEVTQNEGTKTIANNLTSTIQVFTDSEYQLPYVLGSAHQGCLPPFPADVFMIPQYGNLTLNNGSQAVGRSSFYCLEYFPSQMLRTGNNFSFSYTFEDVPFHSSYAHSQSLDRLMNPLIDQYLYYLSRTQSTGGTAGTQQLLFSQAGPSNMSAQARNWLPGPCYRQQRVSTTLSQNNNSNFAWTGATKYHLNGRDSLVNPGVAMATNKDDEDRFFPSSGILMFGKQGAGKDNMGYSNVMLTSEEEIKTTNPVATEQYGVVADNLQQQNTAPIVGAVNSQGALPGMVWQNRDVYLQGPIWAKIPHTDGNFHPSPLMGGFGLKHPPPQILIKNTPVPADPPTAFNQAKLNSFITQYGTGQVSVEIEWELQKENSKRWNPEIQYTSNYYKSTNVDFAVNTEGVYSEPRPIGTRYLTRNL

SEQ ID NO: 5007 - DNA, 2217 bp, Adeno-associated virus
atggctgccgatggttatcttccagattggctcgaggacaacctctctgagggcattcgcgagtggtgggacctgaaacctggagccccgaaacccaaagccaaccagcaaaagcaggacgacggccggggtctggtgcttcctggctacaagtacctcggacccttcaacggactcgacaagggggagcccgtcaacgcggcggacgcagcggccctcgagcacgacaaggcctacgaccagcagctcaaagcgggtgacaatccgtacctgcggtataatcacgccgacgccgagtttcaggagcgtctgcaagaagatacgtcttttgggggcaacctcgggcgagcagtcttccaggccaagaagcgggttctcgaacctctcggtctggttgaggaaggcgctaagacggctcctggaaagaagagaccggtagagccgtcaccacagcgttcccccgactcctccacgggcatcggcaagaaaggccagcagcccgccggaaagagactcaatttcggtcagactggcgactcagagtcagtccccgaccctcaacctatcggagaacctccagcagcgccctctagtgtgggatctggtacaatggctgcaggcggtggcgcaccaatggcagacaataacgaaggtgccgacggagtgggtagttcctcgggaaattggcattgcgattccacatggctgggcgacagagtcatcaccaccagcacccgaacctgggccctgcccacctacaacaaccacctctacaagcaaatctccaacgggacctcgggaggcagcaccaacgacaacacctactttggctacagcaccccctgggggtattttgactttaacagattccactgccacttctcaccacgtgactggcagcgactcatcaacaacaactggggattccggcccaagagactcagcttcaagctcttcaacatccaggtcaaagaggtcacgcagaatgaaggcaccaagaccatcgccaataacctcaccagcaccatccaggtgtttacggactcggaataccagctgccgtacgtcctcggctctgcccaccagggctgcctgcctccgttcccggcggacgtcttcatgattcctcagtacggctacctgactctcaacaacggtagtcaggccgtgggacgttcctccttctactgcctggagtacttcccctctcagatgctgagaacgggcaacaacttttccttcagctacactttcgaggacgtgcctttccacagcagctacgcgcacagccagagtttggacaggctgatgaatcctctcgtcgaccagtacctgtactacctgtcaagaacccagtctacgggaggcacagcgggaacccagcagttgctgttttctcaggccgggcctagcaacatgtcggctcaggccagaaactggctgcctggaccctgctacagacagcagcgcgtctccacgacactgtcgcaaaacaacaacagcaactttgcctggactggtgccaccaagtatcatctgaacggcagagactctctggtgaatccgggcgtcgccatggcaaccaacaaggacgacgaggaccgcttcttcccatccagcggcatcctcatgtttggcaagcagggagctggaaaagacaacgtggactatagcaacgtgatgctaaccagcgaggaagaaatcaagaccaccaaccccgtggccacagaacagtatggcgtggtggctgataacctacagcagcaaaacaccgctcctattgtgggggccgtcaacagccagggagccttacctggcatggtctggcagaaccgggacgtgtacctgcagggtcctatttgggccaagattcctcacacagatggcaactttcacccgtctcctttaatgggcggctttggacttaaacatccgcctcctcagatcctcatcaaaaacactcctgttcctgcggatcctccaacagcgttcaaccaggccaagctgaattctttcatcacgcagtacagcaccggacaagtcagcgtggagatcgagtgggagctgcagaaggagaacagcaagcgctggagcccagagattcagtatacttccaactactacaaatctacaaatgtggactttgctgttaatactgagggtgtttactctgagcctcgccccattggcactcgttacctcacccgtaatctgtaa

SEQ ID NO: 5008 - protein, 738 aa, Adeno-associated virus
MAADGYLPDWLEDNLSEGIREWWDLKPGAPKPKANQQKQDDGRGLVLPGYKYLGPFNGLDKGEPVNAADAAALEHDKAYDQQLKAGDNPYLRYNHADAEFQERLQEDTSFGGNLGRAVFQAKKRVLEPLGLVEEGAKTAPGKKRPVEPSPQRSPDSSTGIGKKGQQPAGKRLNFGQTGDSESVPDPQPIGEPPAAPSSVGSGTMAAGGGAPMADNNEGADGVGSSSGNWHCDSTWLGDRVITTSTRTWALPTYNNHLYKQISNGTSGGSTNDNTYFGYSTPWGYFDFNRFHCHFSPRDWQRLINNNWGFRPKRLSFKLFNIQVKEVTQNEGTKTIANNLTSTIQVFTDSEYQLPYVLGSAHQGCLPPFPADVFMIPQYGYLTLNNGSQAVGRSSFYCLEYFPSQMLRTGNNFSFSYTFEDVPFHSSYAHSQSLDRLMNPLVDQYLYYLSRTQSTGGTAGTQQLLFSQAGPSNMSAQARNWLPGPCYRQQRVSTTLSQNNNSNFAWTGATKYHLNGRDSLVNPGVAMATNKDDEDRFFPSSGILMFGKQGAGKDNVDYSNVMLTSEEEIKTTNPVATEQYGVVADNLQQQNTAPIVGAVNSQGALPGMVWQNRDVYLQGPIWAKIPHTDGNFHPSPLMGGFGLKHPPPQILIKNTPVPADPPTAFNQAKLNSFITQYSTGQVSVEIEWELQKENSKRWSPEIQYTSNYYKSTNVDFAVNTEGVYSEPRPIGTRYLTRNL

SEQ ID NO: 5009 - DNA, 2217 bp, Adeno-associated virus
atggttgccgatggttatcttccagattggctcgaggacaacctctctgagggcattcgcgagtggtgggacctgaaacctggagccccgaaacccaaagccaaccagcaaaagcagggcgacggccggggtctggtgcttcctggctacaagtacctcggacccttcaacggactcgacaagggggagcccgtcaacgcggcggacgcagcggccctcgagcacgacaaggcctacgaccagcagcttaaagcgggtgacaatccgtacctgcggtataatcacgccgacgccgagcttcaggagcgtctgcaagaagatacgtcttttgggggcaacctcgggcgagcagtcttccaggccaagaagcgggttctcgaacctctcggtctggttgaggaaggcgctaagacggctcctggaaagaagagaccggtagagccgtcaccacagcgttcccccgactcctccacgggcatcggcaagaaaggccagcagcccgccagaaagagactcaatttcggtcagactggcgactcagagtcagtccccgaccctcaacctatcggagaacctccagcagcgccctctagtgtgggatctggtacaatggctgcaggcggtggcgcgccaatggcagacaataacgaaggtgccgacggagtgggtagttcctcgggaaattggcattgcgattccacatggctgggcgacagagtcatcaccaccagcacccgaacctgggccctgcccacctacaacaaccacctctacaagcaaatctccaacgggacctcgggaggcagcaccaacgacaacacctactttggctacagcaccccctgggggtattttgactttaacagattccactgccacttctcaccacgtgactggcagcgactcatcaacaacaactggggattccggcccaagagactcagcttcaagctcttcaacatccaggtcaaagaggtcacgcagaatgaaggcaccaagaccatcgccaataacctcaccagcaccatccaggtgtttacggactcggaataccagctgccgtacgtcctcggctctgcccaccagggctgccagcctccgttcccggcggacgtcttcatgattcctcagtacggctacctgactctcaacaacggtagtcaggccgtgggacgttcctccttctactgcctggagtacttcccctctcagatgctgagaacgggcaacaacttttccttcagctacactttcgaggacgtgcctttccacagcagctacgcgcacagccagagtttggacaggctgatgaatcctctcatcgaccagtacctgtactacctgtcaagaacccagtctacgggaggcacagcgggaacccagcagttgctgttttctcaggccgggcctagcaacatgtcggctcaggccagaaactggctgcctggaccctgctacagacagcagcgcgtctccacgacactgtcgcaaaacaacaacagcaactttgcctggactggtgccaccaagtatcatctgaacggcagagactctctggtgaatccgggcgtcgccatggcaaccaacaaggacgacgaggaccgcttcttcccatccagcggcatcctcatgtttggcaagcagggagctggaaaagacaacgtggactatagcaacgtgatgctaaccagcgaggaagaaatcaagaccaccaaccccgtggccacagaacagtatggcgtggtggctgataacctacagcagcaaaacaccgctcctattgtgggggccgtcaacagccagggagccttacctggcatggtctggcagaaccgggacgtgtacctgcagggtcctatttgggccaagattcctcacacagatggcaactttcacccgtctcctttaatgggcggctttggacttaaacatccgcctcctcagatcctcatcaaaaacactcctgttcctgcggatcctccaacagcgttcaaccaggccaagctgaattctttcatcacgcagtacagcaccggacaagtcagcgtggagatcgagtgggagccgcagaaggagaacagcaagcgctggaacccagagattcagtatacttccaactactacaaatctacaaatgtggactttgctgttaatactgagggtgtttactctgagcctcgccccattggcactcgttacctcacccgtaatctgtaa

SEQ ID NO: 5010 - protein, 738 aa, Adeno-associated virus
MVADGYLPDWLEDNLSEGIREWWDLKPGAPKPKANQQKQGDGRGLVLPGYKYLGPFNGLDKGEPVNAADAAALEHDKAYDQQLKAGDNPYLRYNHADAELQERLQEDTSFGGNLGRAVFQAKKRVLEPLGLVEEGAKTAPGKKRPVEPSPQRSPDSSTGIGKKGQQPARKRLNFGQTGDSESVPDPQPIGEPPAAPSSVGSGTMAAGGGAPMADNNEGADGVGSSSGNWHCDSTWLGDRVITTSTRTWALPTYNNHLYKQISNGTSGGSTNDNTYFGYSTPWGYFDFNRFHCHFSPRDWQRLINNNWGFRPKRLSFKLFNIQVKEVTQNEGTKTIANNLTSTIQVFTDSEYQLPYVLGSAHQGCQPPFPADVFMIPQYGYLTLNNGSQAVGRSSFYCLEYFPSQMLRTGNNFSFSYTFEDVPFHSSYAHSQSLDRLMNPLIDQYLYYLSRTQSTGGTAGTQQLLFSQAGPSNMSAQARNWLPGPCYRQQRVSTTLSQNNNSNFAWTGATKYHLNGRDSLVNPGVAMATNKDDEDRFFPSSGILMFGKQGAGKDNVDYSNVMLTSEEEIKTTNPVATEQYGVVADNLQQQNTAPIVGAVNSQGALPGMVWQNRDVYLQGPIWAKIPHTDGNFHPSPLMGGFGLKHPPPQILIKNTPVPADPPTAFNQAKLNSFITQYSTGQVSVEIEWEPQKENSKRWNPEIQYTSNYYKSTNVDFAVNTEGVYSEPRPIGTRYLTRNL

SEQ ID NO: 5011 - DNA, 2217 bp, Adeno-associated virus
atggctgccgatggttatcttccagattggctcgaggacaacctctctgagggcattcgcgagtggtgggacctgaaacctggagccccgaaacccaaagccaaccagcaaaagcaggacgacggccggggtctggtgcttcctggctacaagtacctcggacccttcaacggactcgacaagggggagcccgtcaacgcggcggacgcagcggccctcgagcacgacaaggcctacgaccagcagctcaaagcgggtgacaatccgtacctgcggtataatcacgccgacgccgagtttcaggagcgtctgcaagaagatacgtcttttgggggcaacctcgggcgagcagtcttccaggccaagaagcgggttctcgaacctctcggtctggttgaggaaggcgctaagacggctcctggaaagaagagaccggtagagccgtcaccacagcgttcccccgactcctccacgggcatcggcaagaaaggccagcagcccgccagaaagagactcaatttcggtcagactggcgactcagagtcagtccccgaccctcaacctatcggagaacctccagcagcgccctctagtgtgggatctggtacaatggctgcaggcggtggcgcaccaatggcagacaataacgaaggtgccgacggagtgggtagttcctcgggaaattggcattgcgattccacatggctgggcgacagagtcatcaccaccagcacccgaacctgggccctgcccacctacaacaaccacctctacaagcaaatctccaacgggacctcgggaggcagcaccaacgacaacacctactttggctacagcaccccctgggggtattttgactttaacagattccactgccacttctcaccacgtgactggcagcgactcatcaacaacaactggggattccggcccaagagactcagcttcaagctcttcaacatccaggtcaaagaggtcacgcagaatgaaggcaccaagaccatcgccaatagcctcaccagcaccatccaggtgtttacggactcggaataccagctgccgtacgtcctcggctctgcccaccagggctgcctgcctccgttcccggcggacgtcttcatgattcctcagtacggctacctgactcccaacaacggtagtcaggccgtgggacgttcctccttctactgcctggagtacttcccctctcagatgctgagaacgggcaacaacttttccttcagctacactttcgaggacgtgcctttccacagcagctacgcgcacagccagagtttggacaggctgatgaatcctctcatcgaccagtacctgtactacctgtcaagaacccagtctacgggaggcacagcgggaacccagcagttgctgtcttctcaggccgggcctagcaacatgtcggctcaggccagaaactggctgcctggaccctgctacagacagcagcgcgtctccacgacactgtcgcaaaacaacaacagcaactttgcctggactggtgccaccaagtatcatctgaacggcagagactctctggtgaatccgggcgtcgccatggcaaccaacaaggacgacgaggaccgcttcttcccatccagcggcatcctcatgtttggcaagcagggagctggaaaagacaacgtggactatagcaacgtgatgctaaccagcgaggaagaaatcaagaccaccaaccccgtggccacagaacagtatggcgtggtggctgataacctacagcagcaaaacaccgctcctattgtgggggccgtcaacagccagggagccttacctggcatggtctggcagaaccgggacgtgtacttgcagggtcctatttgggccaagattcctcacacagatggcaactttcacccgtctcctttaatgggcggctttggacttaaacatccgcctcctcagatcctcatcaaaaacactcctgttcctgcggatcctccaacagcgttcaaccaggccaagctgaattctttcatcacgcagtacagcaccggacaagtcagcgtggagatcgagtgggagctgcagaaggagaacagcaagcgctggaacccagagattcagtatacttccaactactacaaatctacaaatgtggactttgctgttaatactgagggtgtttactctgagcctcgccccattggcactcgttacctcacccgtaatctgtaa

SEQ ID NO: 5012 - protein, 738 aa, Adeno-associated virus
MAADGYLPDWLEDNLSEGIREWWDLKPGAPKPKANQQKQDDGRGLVLPGYKYLGPFNGLDKGEPVNAADAAALEHDKAYDQQLKAGDNPYLRYNHADAEFQERLQEDTSFGGNLGRAVFQAKKRVLEPLGLVEEGAKTAPGKKRPVEPSPQRSPDSSTGIGKKGQQPARKRLNFGQTGDSESVPDPQPIGEPPAAPSSVGSGTMAAGGGAPMADNNEGADGVGSSSGNWHCDSTWLGDRVITTSTRTWALPTYNNHLYKQISNGTSGGSTNDNTYFGYSTPWGYFDFNRFHCHFSPRDWQRLINNNWGFRPKRLSFKLFNIQVKEVTQNEGTKTIANSLTSTIQVFTDSEYQLPYVLGSAHQGCLPPFPADVFMIPQYGYLTPNNGSQAVGRSSFYCLEYFPSQMLRTGNNFSFSYTFEDVPFHSSYAHSQSLDRLMNPLIDQYLYYLSRTQSTGGTAGTQQLLSSQAGPSNMSAQARNWLPGPCYRQQRVSTTLSQNNNSNFAWTGATKYHLNGRDSLVNPGVAMATNKDDEDRFFPSSGILMFGKQGAGKDNVDYSNVMLTSEEEIKTTNPVATEQYGVVADNLQQQNTAPIVGAVNSQGALPGMVWQNRDVYLQGPIWAKIPHTDGNFHPSPLMGGFGLKHPPPQILIKNTPVPADPPTAFNQAKLNSFITQYSTGQVSVEIEWELQKENSKRWNPEIQYTSNYYKSTNVDFAVNTEGVYSEPRPIGTRYLTRNL

SEQ ID NO: 5013 - protein, 738 aa, Adeno-associated virus
MAADGYLPDWLEDNLSEGIREWWDLKPGAPKPKANQQKQDDGRGLVLPGYKYLGPFNGLDKGEPVNAADAAALEHDKAYDQQLKAGDNPYLRYNHADAEFQERLQEDTSFGGNLGRAVFQAKKRVLEPLGLVEEGAKTAPGKKRPVEPSPQRSPDSSTGIGKKGQQPARKRLNFGQTGDSESVPDPQPIGEPPAAPSSVGSGTMAAGGGAPMADNNEGADGVGSSSGNWHCDSTWLGDRVITTSTRTWALPTYNNHLYKQISNGTSGGSTNDNTYFGYSTPWGYFDFNRFHCHFSPRDWQRLINNNWGFRPKRLSFKLFNIQVKEVTQNEGTKTIANNLTSTIQVFTDSEYQLPYVLGSAHQGCLPPFPADVFMIPQYGYLTLNNGSQAVGRSSFYCLEYFPSQMLRTGNNFSFSYTFEDVPFHSSYVHSQSLDRLMNPLIDQYLYYLSRTQSTGGTAGTQQLLFSQAGPSNMSAQARNWLPGPCYRQQRVSTTLSQNNNSNFAWTGATKYHLNGRDSLVNSGVAMATNKDDEDRFFPSSGILMFGKQGAGKDNVDYSNVMLTSEEEIKTTNPVATEQYGVVADNLQQQNTAPIVGAVNSQGALPGMVWQNRDVYLQGPIWAKIPHTDGNFHPSPLMGGFGLKHPPPQILIKNTPVPADPPTAFNQAKLNSFITQYSTGQVSVEIEWELQKENSKRWNPEIQYTSNYYKSTNVDFAVNTEGVYSEPRPIGTRYPTRNL

SEQ ID NO: 5014 - DNA, 2217 bp, Adeno-associated virus
atggctgccgatggttatcttccagattggctcgaggacaacctctctgagggcattcgcgagtggtgggacctgaaacctggagccccgaaacccaaagccaaccagcaaaagcaggacgacggccggggtctggtgcttcctggctacaagtacctcggacccttcaacggactcgacaagggggagcccgtcaacgcggcggacgcagcggccctcgagcacgacaaggcctacgaccagcagctcaaagcgggtgacaatccgtacctgcggtataatcacgccgacgccgagtttcaggagcgtctgcaagaagatacgtcttttgggggcaacctcgggcgagcagtcttccaggccaagaagcgggttctcgaacctctcggtctggttgaggaaggcgctaagacggctcctggaaagaagagaccggtagagccgtcaccacagcgttcccccgactcctccacgggcatcggcaagaaaggccagcagcccgccagaaagagactcaatttcggtcagactggcgactcagagtcagtccccgaccctcaacctatcggagaacctccagcagcgccctctagtgtgggatctggtacaatggctgcaggcggtggcgcaccaatggcagacaataacgaaggtgccgacggagtgggtagttcctcgggaaattggcattgcgattccacatggctgggcgacagagtcatcaccaccagcacccgaacctgggccctgcccacctacaacaaccacctctacaagcaaatctccaacgggacctcgggaggcagcaccaacgacaacacctactttggctacagcaccccctgggggtattttgactttaacagattccactgccacttctcaccacgtgactggcagcgactcatcaacaacaactggggattccggcccaagagactcagcttcaagctcttcaacatccaggtcaaagaggtcacgcagaatgaaggcaccaagaccatcgccaataacctcaccagcaccatccaggtgtttacggactcggaataccagctgccgtacgtcctcggctctgcccaccagggctgcctgcctccgttcccggcggacgtcttcatgattcctcagtacggctacctgactctcaacaacggtagtcaggccgtgggacgttcctccttctactgcctggagtacttcccctctcagatgctgagaacgggcaacaacttttccttcagctacactttcgaggacgtgcctttccacagcagctacgtgcacagccagagtttggacaggctgatgaatcctctcatcgaccagtacctgtactacctgtcaagaacccagtctacgggaggcacagcgggaacccagcagttgctgttttctcaggccgggcctagcaacatgtcggctcaggccagaaactggctgcctggaccctgctacagacagcagcgcgtctccacgacactgtcgcaaaacaacaacagcaactttgcctggactggtgccaccaagtatcatctgaacggcagagactctctggtgaattcgggcgtcgccatggcaaccaacaaggacgacgaggaccgcttcttcccatccagcggcatcctcatgtttggcaagcagggagctggaaaagacaacgtggactatagcaacgtgatgctaaccagcgaggaagaaatcaagaccaccaaccccgtggccacagaacagtatggcgtggtggctgataacctacagcagcaaaacaccgctcctattgtgggggccgtcaacagccagggagccttacctggcatggtctggcagaaccgggacgtgtacctgcagggtcctatttgggccaagattcctcacacagatggcaactttcacccgtctcctttaatgggcggctttggacttaaacatccgcctcctcagatcctcatcaaaaacactcctgttcctgcggatcctccaacagcgttcaaccaggccaagctgaattctttcatcacgcagtacagcaccggacaagtcagcgtggagatcgagtgggagctgcagaaggagaacagcaagcgctggaacccagagattcagtatacttccaactactacaaatctacaaatgtggactttgctgttaatactgagggtgtttactctgagcctcgccccattggcactcgttaccccacccgtaatctgtaa

SEQ ID NO: 5015 - protein, 734 aa, Adeno-associated virus; identical to SEQ ID NO: 4911

SEQ ID NO: 5016 - DNA, 2214 bp, Adeno-associated virus
atggctgctgacggttatcttccagattggctcgaggacaacctctctgagggcattcgcgagtggtgggacctgaaacctggagccccgaaacccaaagccaaccagcagaagcaggacgacggccggggtctggtgcttcctggctacaagtacctcggacccttcaacggactcgacaagggggagcccgtcaacgcggcggacgcagcggccctcgagcacgacaaggcctacgaccagcagctcaaagcgggtgacaatccgtacctgcggtataaccacgccgacgccgagtttcaggagcgtctgcaagaagatacgtcttttgggggcaacctcgggcgagcagtcttccaggccaagaagcgggttctcgaacctctcggtctggttgaggaagctgctaagacggctcctggaaagaagagaccggtagaaccgtcacctcagcgttcccccgactcctccacgggcatcggcaagaaaggccagcagcccgctagaaagagactgaactttgggcagactggcgactcagagtcagtccccgaccctcaacctctcggagaaccaccagcaggcccctctggtctgggatctggtacaatggctgcaggcggtggcgctccaatggcagacaataacgaaggcgccgacggagtgggtaatgcctcaggaaattggcattgcgattccacatggctgggcgacagagtcatcaccaccagcacccgaacctgggctttgcccacctacaacaaccacctctacaagcaaatctccagtcagtcagcaggtagcaccaacgacaacgtctacttcggctacagcaccccctgggggtattttgacttcaacagattccactgtcacttctcaccacgtgactggcagcgactcatcaacaacaactggggattccggcccaagaagctcaacttcaagctcttcaacatccaagtcaaggaggtcacgacgaatgacggcgtcacgaccatcgctaataaccttaccagcacggttcaggtcttttcggactcggagtaccagctgccgtacgtcctcggctctgcccaccagggctgcctgcctccgttcccggcggacgtcttcatgattcctcagtacggctacctgactctgaacaatggcagccaatcggtgggacgttcatccttctactgcctggaatacttcccttctcaggtgctgagaacgggtaacaacttcaccttcagttacaccttcgaggacgtgcctttccacagcagctacgcgcacagccagagcctagaccggctgatgaatcccctcatcgaccagtacctgtattacctggctagaacacagagtaacccaggaggcacatctggcaatcgggaactgcagttttaccagggcgggccttccaccatggccgaacaagccaagaactggttacctggaccttgcttccggcaacaaagagtttccaaaacactggatcaaaacaacaacagcaactttgcttggactggtgccaccaaatatcacctgaacggcagaaactcattggtgaatcctggtgtcgccatggcaactcacaaggacgacgaggaccgctttttcccatccagcggagtcctgatttttggaaaaactggagcaaccaacaagactacattggaaaacgtgttaatgacaaatgaagaagaaattcgtcctactaatcctgtggccacagaagaatacgggatagtcagcagcaatttacaagcggccaatactgcagcccagacacaagttgtcaacaaccagggagccttacctggcatggtctggcagaaccgggacgtgtacctgcagggtcccatctgggccaaaattcctcacacagacggcaactttcacccgtctccgctgatgggcggctttggactgaagcatccgcctcctcagatcctgatcaaaaacactcctgttcctgctaatcccccggaggtgtttacgcctgccaagtttgcttctttcatcacacagtacagcaccggccaggtcagcgtggagatcgagtgggagctgcagaaggagaacagcaagcgctggaacccagagattcagtatacctccaattttgacaaacagactggtgtggactttgccgttgacagccagggtgtttattctgagcctcgccccattggtactcgttacctcacccgtaatctgtaa

SEQ ID NO: 5017 - protein, 737 aa, Adeno-associated virus
MAADGYLPDWLEDNLSEGIREWWDLKPGAPKPKANQQKQDDGRGLVLPGYKYLGPFNGLDKGEPVNAADAAALEHDKAYDQQLKAGDNPYLRYNHADAEFQERLQEDTSFGGNLGRAVFQAKKRVLEPLGLVEEAAKTAPGKKRPVEPSPQRSPDSSTGIGKKGQQPARKRLNFGQTGDSESVPDPQPLGEPPAGPSGLGSGTMAAGGGAPMADNNEGADGVGNASGNWHCDSTWLGDRVITTSTRTWALPTYNNHLYKQISSQSAGSTNDNVYFGYSTPWGYFDFNRFHCHFSPRDWQRLINNNWGFRPKKLNFKLFNIQVKEVTTNDGVTTIANNLTSTVQVFSDSEYQLPYVLGSAHQGCLPPFPADVFMIPQYGYLTLNNGSQSVGRSSFYCLEYFPSQVLRTGNNFTFSYTFEDVPFHSSYAHSQSLDRLMNPLIDQYLYYLARTQSNPGGTSGNRELQFYQGGPSTMAEQAKNWLPGPCFRQQRVSKTLDQNNNSNFAWTGATKYHLNGRNSLVNPGVAMATHKDDEDRFFPSSGVLIFGKTGATNKTTLENVLMTNEEEIRPTNPVATEEYGIVSSNLQAANTAAQTQVVNNQGALPGMVWQNRDVYLQGPIWAKIPHTDGNFHPSPLMGGFGLKHPPPQILIKNTPVPANPPEVFTPAKFASFITQYSTGQVSVEIEWELQKENSKRWNPEIQYTSNFDKQTGVDFAVDSQGVYSEPRPIGTRYLTRNL

SEQ ID NO: 5018 - DNA, 2214 bp, Adeno-associated virus
atggctgccgatggttatcttccagattggctcgaggacaacctctctgagggcattcgcgagtggtgggacctgaaacctggagccccgaaacccaaagccaaccagcaaaagcaggacgacggccggggtctggtgcttcctggctacaagtacctcggacccttcaacggactcgacaagggggagcccgtcaacgcggcggacgcagcggccctcgagcacgacaaggcctacgaccagcagctcaaagcgggtgacaatccgtacctgcggtataatcacgccgacgccgagtttcaggagcgtctgcaagaagatacgtcttttgggggcaacctcgggcgagcagtcttccaggccaagaagcgggttctcgaacctctcggtctggttgaggaaggcgctaagacggctcctggaaagaagagaccggtagagccgtcaccacagcgttcccccgactcctccacgggcatcggcaagaaaggccagcagcccgccagaaagagactcaatttcggtcagactggcgactcagagtcagtccccgaccctcaacctatcggagaacctccagcagcgccctctagtgtgggatctggtacaatggctgcaggcggtggcgcaccaatggcagacaataacgaaggtgccgacggagtgggtagttcctcgggaaattggcattgcgattccacacggctgggcgacagagtcatcaccaccagcacccggacctgggctttgcccacctacaacaaccacctctacaagcaaatctccagtcagtcagcaggtagcaccaacgacaacgtctacttcggctacagcaccccctgggggtattttgacttcaacagattccactgtcacttctcaccacgtgactggcagcggctcatcaacaacaactggggattccggcccaagaagctcaacttcaagctgttcaacatccaggtcaaggaggtcacaacgaatgacggcgtcacgaccatcgccaataaccttaccagcacggttcaggtcttttcggactcggaataccagctgccctacgtcctcggctccgcacaccagggctgcctgcctccgttcccggcggacgtcttcatgattccccagtacggctacctgactctgaacaatggcagccaatcggtgggtcgttcctctttctactgcctggaatatttcccttctcaaatgctgagaacgggcaacaacttcaccttcagctacaccttcgaggacgttcccttccacagcagctacgcacacagccagagcctggaccggctgatgaatcctcttatcgaccagtacctgtattacctggccagaacacagagcaacgcaggaggcacagctggcaatcgggaactgcagttttatcagggcgggcctaccaccatggccgaacaagccaaaaactggctgcctggaccttgcttccggcaacgaagagtctccaagacgctggatcaaaacaacaacagcaactttgcttggactggtgccaccaaataccatctaaatggaagaaattcattggttaatcccggtgtcgccatggcaacccacaaggacgacgaggaacgcttcttcccttcgagcggagtcctgatttttggaaaaactggagcagctaataagactacactggaaaatgtgttaatgacaaatgaagaggaaattcgtcctaccaacccggtagccaccgaggaatacgggactgttagcagcaacctgcaggcggctaacactgcagcccagacacaagttgtcaacaaccagggagccttacctggtatggtctggcagaaccgggacgtgtacctgcagggtcccatctgggccaagattcctcacacggacggcaactttcacccgtctccgctgatgggcggctttggactgaagcatccgcctcctcagatcctgatcaaaaacactcctgttcctgctaatcccccggaggtgtttacgcctgccaagtttgcttctttcatcacacagtacagcaccggccaggtcagcgtggagatcgagtgggagctgcagaaggagaacagcaagcgctggaacccagagattcagtatacctccaattttgacaaacagactggtgtggactttgccgttgacagccagggtgtttattctgagcctcgccccattggtactcgttacctcacccgtaatctgtaa

SEQ ID NO: 5019 - protein, 737 aa, Adeno-associated virus
MAADGYLPDWLEDNLSEGIREWWDLKPGAPKPKANQQKQDDGRGLVLPGYKYLGPFNGLDKGEPVNAADAAALEHDKAYDQQLKAGDNPYLRYNHADAEFQERLQEDTSFGGNLGRAVFQAKKRVLEPLGLVEEGAKTAPGKKRPVEPSPQRSPDSSTGIGKKGQQPARKRLNFGQTGDSESVPDPQPIGEPPAAPSSVGSGTMAAGGGAPMADNNEGADGVGSSSGNWHCDSTRLGDRVITTSTRTWALPTYNNHLYKQISSQSAGSTNDNVYFGYSTPWGYFDFNRFHCHFSPRDWQRLINNNWGFRPKKLNFKLFNIQVKEVTTNDGVTTIANNLTSTVQVFSDSEYQLPYVLGSAHQGCLPPFPADVFMIPQYGYLTLNNGSQSVGRSSFYCLEYFPSQMLRTGNNFTFSYTFEDVPFHSSYAHSQSLDRLMNPLIDQYLYYLARTQSNAGGTAGNRELQFYQGGPTTMAEQAKNWLPGPCFRQRRVSKTLDQNNNSNFAWTGATKYHLNGRNSLVNPGVAMATHKDDEERFFPSSGVLIFGKTGAANKTTLENVLMTNEEEIRPTNPVATEEYGTVSSNLQAANTAAQTQVVNNQGALPGMVWQNRDVYLQGPIWAKIPHTDGNFHPSPLMGGFGLKHPPPQILIKNTPVPANPPEVFTPAKFASFITQYSTGQVSVEIEWELQKENSKRWNPEIQYTSNFDKQTGVDFAVDSQGVYSEPRPIGTRYLTRNL

SEQ ID NO: 5020 - DNA, 2208 bp, Adeno-associated virus
atggctgccgatggttatcttccagattggctcgaggacactctctctgaaggaataagacagtggtggaagctcaaacctggcccaccaccaccaaagcccgcagagcggcataaggacgacagcaggggtcttgtgcttcctgggtacaagtacctcggacccttcaacggactcgacaagggggagccggtcaacgaggcagacgccgcggccctcgagcacgacaaggcctacgaccggcagctcgacagcggagacaacccgtacctcaagtacaaccacgccgacgcggagtttcaggagcgtcttaaagaagatacgtcttttgggggcaacctcggacgagcagtcttccaggcgaaaaagagggttcttgaacctctgggcctggttgaggaacctgttaagacggctccgggaaaaaagaggccggtagagcactctcctgcggagccagactcctcctcgggaaccggaaaagcgggccagcagcctgcaagaaaaagattgaattttggtcagactggagacgcagactccgtacctgacccccagcctctcggacagccaccagcagccccctctggtttgggatctactacaatggctacaggcagtggcgcaccaatggcagacaataacgagggtgccgatggagtgggtaattcttcaggaaattggcattgcgattcccaatggctgggcgacagagtcatcaccaccagcacccgaacctgggcccagcccacctacaacaaccacctctacaagcaaatctcaagccaatcaggagcctcaaacgacaaccactactttggctacagcaccccttgggggtattttgacttcaacagattccactgccacttttcaccacgtgactggcaaagactcatcaacaacaactggggattccgacccaagagactcaacttcaagctctttaacattcaagtcaaagaggtcacgcagaatgacggtacgacgacgattgccaataaccttaccagcacggttcaggtgtttactgactcggagtaccagctcccgtacgtcctcgggtcggcgcatcaaggatgcctcccgccgtttccagcggacgtcttcatggtcccacagtatggatacctcaccctgaacaacgggagtcaggcggtaggacgctcttccttttactgcctggagtactttccttctcagatgcttcgtactggaaacaactttcagttcagctacacctttgaagacgttcctttccacagcagctacgctcacagccagagtctggatcggctgatgaatcctctgatcgaccagtacctgtattatctgaacaaaacacaatcaaatagtggagctcttcagcagtctcggctactgtttagtcaagctggacccaccagcatgtctcttcaagctaaaaactggctacctggaccttgctacagacagcagcgtctgtcaaagcaggcaaacgacaacaacaacagcaactttccctggactgcggctacaaagtaccacctaaatggccgggactcgttggttaatccaggaccagctatggccagtcacaaagacgatgaagaaaagtttttccccatgcatggaaccctgatatttggtaaacaaggaacaaatgctaacgacgcggatttggacaatgtcatgattacagatgaagaagaaatccgcaccaccaatcccgtggctacggagcagtacggatatgtgtcaaataatttgcaaaactcaaatactggtccaactactggaactgtcaatcaccgaggagcgttacctggcatggtgtggcaggatcgagacgtgtacctgcagggacccatttgggccaagattcctcacaccgatggacactttcatccttctccactgatgggaggttttgggctcaaacacccgcctcctcagatcatgatcaaaaacactcccgttccagccaatcctcccacaaacttcagttctgccaagtttgcttctttcatcacacagtattccacggggcaggtcagcgtggagatcgagtgggagctgcagaaagagaacagcaaacgctggaatcccgaaattcagtacacttccaactacaacaaatctgttaatgtggactttactgtggacactaatggcgtgtattcagagcctcgccccattggcaccagatacctgactcgtaatctgtaa

SEQ ID NO: 5021 - protein, 735 aa, Adeno-associated virus
MAADGYLPDWLEDTLSEGIRQWWKLKPGPPPPKPAERHKDDSRGLVLPGYKYLGPFNGLDKGEPVNEADAAALEHDKAYDRQLDSGDNPYLKYNHADAEFQERLKEDTSFGGNLGRAVFQAKKRVLEPLGLVEEPVKTAPGKKRPVEHSPAEPDSSSGTGKAGQQPARKRLNFGQTGDADSVPDPQPLGQPPAAPSGLGSTTMATGSGAPMADNNEGADGVGNSSGNWHCDSQWLGDRVITTSTRTWAQPTYNNHLYKQISSQSGASNDNHYFGYSTPWGYFDFNRFHCHFSPRDWQRLINNNWGFRPKRLNFKLFNIQVKEVTQNDGTTTIANNLTSTVQVFTDSEYQLPYVLGSAHQGCLPPFPADVFMVPQYGYLTLNNGSQAVGRSSFYCLEYFPSQMLRTGNNFQFSYTFEDVPFHSSYAHSQSLDRLMNPLIDQYLYYLNKTQSNSGALQQSRLLFSQAGPTSMSLQAKNWLPGPCYRQQRLSKQANDNNNSNFPWTAATKYHLNGRDSLVNPGPAMASHKDDEEKFFPMHGTLIFGKQGTNANDADLDNVMITDEEEIRTTNPVATEQYGYVSNNLQNSNTGPTTGTVNHRGALPGMVWQDRDVYLQGPIWAKIPHTDGHFHPSPLMGGFGLKHPPPQIMIKNTPVPANPPTNFSSAKFASFITQYSTGQVSVEIEWELQKENSKRWNPEIQYTSNYNKSVNVDFTVDTNGVYSEPRPIGTRYLTRNL

SEQ ID NO: 5022 - DNA, 2217 bp, Adeno-associated virus
atggctgccgatggttatcttccagattggctcgaggacaacctctctgagggcattcgcgagtggtgggcgctgaaacctggagccccgaagcccaaagccaaccagcaaaagcaggacgacggccggggtctggtgcttcctggctacaagtacctcggacccttcaacggactcgacaagggggagcccgtcaacgcggcggacgcagcggccctcgagcacgacaaggcctacgaccagcagctgcaggcgggtgacaatccgtacctgcggtataatcacgccgacgccgagtttcaggagcgtctgcaagaagatacgtcttttgggggcaacctcgggcgagcagtcttccaggccaagaagcgggttctcgaacctctcggtctggttgaggaaggcgctaagacggctcctggaaagaagagaccggtagagccgtcaccacagcgttcccccgactcctccacgggcatcggcaagaaaggccagcagcccgccagaaagagactcaatttcggtcagactggcgactcagagtcagtccccgaccctcaacctatcggagaacctccagcagcgccctctagtgtgggatctggtacaatggctgcaggcggtggcgcgccaatggcagacaataacgaaggtgccgacggagtgggtagttcctcgggaaattggcattgcgattccacatggctgggcgacagagtcatcaccaccagcacccgaacctgggccctgcccacctacaacaaccacctctacaagcaaacctccaacgggacctcgggaggcagcaccaacgacaacacctactttggctacagcaccccctgggggtattttgactttaacagattccactgccacttctcaccacgtgactggcagcgactcatcaacaacaactggggattccggcccaagagactcagcttcaagctcttcaacatccaggtcaaagaggtcacgcagaatgaaggcaccaagaccatcgccaataacctcaccagcaccatccaggtgtttacggactcggaataccagctgccgtacgtcctcggctctgcccaccagggctgcctgcctccgttcccggcggacgtcttcatgattcctcagtacggctacctgactctcaacaacggtagtcaggccgtgggacgttcctccttctactgcctggagtacttcccctctcagatgctgagaacgggcaacaacttttccttcagctacactttcgaggacgtgcctttccacagcagctacgcgcacagccagagtttggacaggctgatgaatcctctcatcgaccagtacctgtactacctgtcaagaacccagtctacgggaggcacagcgggaacccagcagttgctgttttctcaggccgggcctagcaacatgtcggctcaggccagaaactggctgcctggaccctgctacagacagcagcgcgtctccacgacactgtcgcaaaacaacaacagcaactttgcctggactggtgccaccaagtatcatctgaacggcagagactctctggtgaatccgggcgtcgccatggcaaccaacaaggacgacgaggaccgcttcttcccatccagcggcatcctcatgtttggcaagcagggagctggaaaagacaacgtggactatagcaacgtgatgctaaccagcgaggaagaaatcaagaccaccaaccccgtggccacagaacagtatggcgtggtggctgataacctacagcagcaaaacaccgctcctattgtgggggccgtcaacagccagggagccttacctggcatggtctggcagaaccgggacgtgtacctgcagggtcctatttgggccaagattcctcacacagatggcaactttcacccgtctcctttaatgggcggctttggacttaaacatccgcctcctcagatcctcatcaaaaacactcctgttcctgcggatcctccaacagcgttcaaccaggccaagctgaattctttcatcacgcagtacagcaccggacaagtcagcgcggagatcgagtgggagctgcagaaggagaacagcaagcgctggaacccagagattcagtatacttccaactactacaaatctacaaatgtggactttgctgttaatactgagggtgtttactctgagcctcgccccattggcactcgttacctcacccgtaatctgtaa

SEQ ID NO: 5023 - protein, 738 aa, Adeno-associated virus
MAADGYLPDWLEDNLSEGIREWWALKPGAPKPKANQQKQDDGRGLVLPGYKYLGPFNGLDKGEPVNAADAAALEHDKAYDQQLQAGDNPYLRYNHADAEFQERLQEDTSFGGNLGRAVFQAKKRVLEPLGLVEEGAKTAPGKKRPVEPSPQRSPDSSTGIGKKGQQPARKRLNFGQTGDSESVPDPQPIGEPPAAPSSVGSGTMAAGGGAPMADNNEGADGVGSSSGNWHCDSTWLGDRVITTSTRTWALPTYNNHLYKQTSNGTSGGSTNDNTYFGYSTPWGYFDFNRFHCHFSPRDWQRLINNNWGFRPKRLSFKLFNIQVKEVTQNEGTKTIANNLTSTIQVFTDSEYQLPYVLGSAHQGCLPPFPADVFMIPQYGYLTLNNGSQAVGRSSFYCLEYFPSQMLRTGNNFSFSYTFEDVPFHSSYAHSQSLDRLMNPLIDQYLYYLSRTQSTGGTAGTQQLLFSQAGPSNMSAQARNWLPGPCYRQQRVSTTLSQNNNSNFAWTGATKYHLNGRDSLVNPGVAMATNKDDEDRFFPSSGILMFGKQGAGKDNVDYSNVMLTSEEEIKTTNPVATEQYGVVADNLQQQNTAPIVGAVNSQGALPGMVWQNRDVYLQGPIWAKIPHTDGNFHPSPLMGGFGLKHPPPQILIKNTPVPADPPTAFNQAKLNSFITQYSTGQVSAEIEWELQKENSKRWNPEIQYTSNYYKSTNVDFAVNTEGVYSEPRPIGTRYLTRNL

SEQ ID NO: 5024 - DNA, 2217 bp, Adeno-associated virus
atggctgctgacggttatcttccagattggctcgaggacaacctctctgagggcattcgcgagtggtgggacctgaaacctggagcccccaagcccaaggccaaccagcagaagcaggacgacggccggggtctggtgcttcctggctacaagtacctcggacccttcaacggactcgacaagggggagcccgtcaacgcggcggacgcagcggccctcgagcacgacaaggcctacgaccagcagctcaaagcgggtgacaatccgtacctgcggtataatcacgccgacgccgagtttcaggagcgtctgcaagaagatacgtcttttgggggcaacctcgggcgagcagtcttccaggccaagaagcgggttctcgaacctctcggtctggttgaggaagctgctaagacggctcctggaaagaagagaccggtagaaccgtcacctcagcgttcccccgactcctccacgggcatcggcaagaaaggccagcagcccgctagaaagagactgaactttgggcagactggcgactcagagtcagtccccgaccctcaaccaatcggagaacctccagcagcgccctctagtgtgggatctggtacaatggccgcaggcggtggcgcaccaatggcagacaataacgaaggtgccgacggagtgggtagttcctcgggaaattggcattgcgattccacatggctgggcgacagagtcatcaccaccagcacccgaacctgggccctgcccacctacaacaaccacctctacaagcaaatctccaacgggacctcgggaggcagcaccaacgacaacacctactttggctacagcaccccctgggggtattttgactttaacagattccactgccacttctcaccacgtgactggcagcgactcatcaacaacaactggggattccggcccaagagactcagcttcaagctcttcaacatccaggtcaaagaggtcacgcagaatgaaggcaccaagaccatcgccaataacctcaccagcaccatccaggtgtttacggactcggaataccagctgccgtacgtcctcggctctgcccaccagggctgcctgcctccgttcccggcggacgtcttcatgattcctcagtacggctacctgactctcaacaacggtagtcaggccgtgggacgttcctccttctactgcctggagtacttcccctctcagatgctgagaacgggcaacaacttttccttcagctacactttcgaggacgtgcctttccacagcagctacgcgcacagccagagtttggacaggctgatgaatcctctcatcgaccagtacctgtactacctgtcaagaacccagtctacgggaggcacagcgggaacccagcagctgctgttttctcaggccgggcctagcaacatgtcggctcaggccagaaactggctgcctggaccctgctacagacagcagcgcgtctccacgacactgtcgcaaaacaacaacagcaactttgcctggactggtgccaccaagtatcatctgaacggcagagactctctggtgaatccgggcgtcgccatggcaaccaacaaggacgacgaggaccgcttcttcccatccagcggcatcctcatgtttggcaagcagggagctggaaaagacaacgtggactatagcaacgtgatgctaaccagcgaggaagaaatcaagaccaccaaccccgtggccacagaacagtatggcgtggtggctgataacctacagcagcaaaacaccgctcctattgtgggggccgtcaacagccagggagccttacctggcatggtctggcagaaccgggacgtgtacctgcagggtcctatttgggccaagattcctcacacagatggcaactttcacccgtctcctttaatgggcggctttggacttaaacatccgcctcctcagatcctcatcaaaagcactcctgttcctgcggatcctccaacagcgttcaaccaggccaagctgaattctttcatcacgcagtacagcaccggacaagtcagcgtggagatcgagtgggagctgcagaaggagaacagcaagtgctggaacccagagattcagtatacttccaactactacaaatctacaaatgtggactttgctgttaatactgagggtgtttactctgagcctcgccccattggcactcgttacctcacccgtaatctgtaa

SEQ ID NO: 5025 - protein, 738 aa, Adeno-associated virus
MAADGYLPDWLEDNLSEGIREWWDLKPGAPKPKANQQKQDDGRGLVLPGYKYLGPFNGLDKGEPVNAADAAALEHDKAYDQQLKAGDNPYLRYNHADAEFQERLQEDTSFGGNLGRAVFQAKKRVLEPLGLVEEAAKTAPGKKRPVEPSPQRSPDSSTGIGKKGQQPARKRLNFGQTGDSESVPDPQPIGEPPAAPSSVGSGTMAAGGGAPMADNNEGADGVGSSSGNWHCDSTWLGDRVITTSTRTWALPTYNNHLYKQISNGTSGGSTNDNTYFGYSTPWGYFDFNRFHCHFSPRDWQRLINNNWGFRPKRLSFKLFNIQVKEVTQNEGTKTIANNLTSTIQVFTDSEYQLPYVLGSAHQGCLPPFPADVFMIPQYGYLTLNNGSQAVGRSSFYCLEYFPSQMLRTGNNFSFSYTFEDVPFHSSYAHSQSLDRLMNPLIDQYLYYLSRTQSTGGTAGTQQLLFSQAGPSNMSAQARNWLPGPCYRQQRVSTTLSQNNNSNFAWTGATKYHLNGRDSLVNPGVAMATNKDDEDRFFPSSGILMFGKQGAGKDNVDYSNVMLTSEEEIKTTNPVATEQYGVVADNLQQQNTAPIVGAVNSQGALPGMVWQNRDVYLQGPIWAKIPHTDGNFHPSPLMGGFGLKHPPPQILIKSTPVPADPPTAFNQAKLNSFITQYSTGQVSVEIEWELQKENSKCWNPEIQYTSNYYKSTNVDFAVNTEGVYSEPRPIGTRYLTRNL

SEQ ID NO: 5026 - protein, 738 aa, Adeno-associated virus
MAADGYLPDWLEDNLSEGIREWWDLKPGAPKPKANQQKQDDGRGLVLPGYKYLGPFNGLDKGEPVNAADAAALEHDKAYDQQLKAGDNPYLRYNHADAEFQERLQEDTSFGGNLGRAVFQAKKRVLEPLGLVEEAAKTAPGKKRPVEPSPQRSPDSSTGIGKKGQQPARKRLNFGQTGDSESVPDPQPIGEPPAAPSSVGSGTMAAGGGAPMADNNEGADGVGSSSGNWHCDSTWLGDRVITTSTRTWALPTYNNHLYKQISNGTSGGSTNDNTYFGYSTPWGYFDFNRFHCHFSPRDWQRLINNNWGFRPKRLSFKLFNIQVKEVTQNEGTKTIANNLTSTIQVFTDSEYQLPYVLGSAHQGCLPPFPADVFMIPQYGYLTLNNGSQAVGRSSFYCLEYFPSQMLRTGNNFSFSYTFEDVPFHSSYAHSQSLDRLMNPLIDQYLYYLSRTQSTGGTAGTQQLLFSQAGPSNMSAQARNWLPGPCYRQQRVSTTLSQNNNSNFAWTGATKYHLNGRDSLVNPGVAMATNKDDEDRFFPSSGILMFGKQGAGKDNVDYSNVMLTSEEEIKTTNPVATEQYGVVADNLQQQNTAPIVGAVNSQGALPGMVWQNRDVYLQGPIWAKIPHTDGNFHPSPLMGGFGLKHPPPQILIKSTPVPADPPTAFNQAKLNSFITQYSTGQVSVEIEWELQKENSKRWNPEIQYTSNYYKSTNVDFAVNTEGVYSEPRPIGTRYLTRNL

SEQ ID NO: 5027 - DNA, 2217 bp, Adeno-associated virus
atggctgctgacggttatcttccagattggctcgaggacaacctctctgagggcattcgcgagtggtgggacctgaaacctggagcccccaagcccaaggccaaccagcagaagcaggacgacggccggggtctggtgcttcctggctacaagtacctcggacccttcaacggactcgacaagggggagcccgtcaacgcggcggacgcagcggccctcgagcacgacaaggcctacgaccagcagctcaaagcgggtgacaatccgtacctgcggtataaccacgccgacgccgagtttcaggagcgtctgcaagaagatacgtcttttgggggcaacctcgggcgagcagtcttccaggccaagaagcgggttctcgaacctctcggtctggttgaggaagctgctaagacggctcctggaaagaagagaccggtagaaccgtcacctcagcgttcccccgactcctccacgggcatcggcaagaaaggccagcagcccgctagaaagagactgaactttgggcagactggcgactcagagtcagtccccgaccctcaaccaatcggagaaccaccagcaggcccctctggtctgggatctggtacaatggctgcaggcggtggcgcaccaatggctgacaataacgagggcgccgacggagtgggtaatgcctcaggaaattggcattgcgattccacatggctgggcgacagagtcatcaccaccagcacccgaacctgggctttgcccacctacaacaaccacctctacaagcaaatctccagtcagtcagcaggtagcaccaacgacaacgtctacttcggctacagcaccccctgggggtattttgacttcaacagattccactgtcacttctcaccacgtgactggcagcggctcatcaacaacaactggggattccggcccaagaagctcaacttcaagctgttcaacatccaggtcaaggaggtcacaacgaatgacggcgtcacgaccatcgccaataaccctaccagcacggttcaggtcttttcggactcggaataccagctgccctacgtcctcggctccgcacaccagggctgcctgcctccgttcccggcggacgtcttcatgattccccagtacggctacctgactctgaacaatggcagccaatcggtgggtcgttcctctttctactgcctggaatatttcccttctcaaatgctgagaacgggcaacaacttcaccttcagctacaccttcgaggacgttcccttccacagcagctacgcacacagccagagcctggaccggctgatgaatcctcttatcgaccagtacctgtattacctggccagaacacagagcaacgcaggaggcacagctggcaatcgggaactgcagttttatcagggcgggcctaccaccatggccgaacaagccaaaaactggctgcctggaccctgctacagacagcagcgcgtctccacgacactgtcgcaaaacaacaacagcaactttgcctggactggtgccaccaagtatcatctgaacggcagagactctctggtgaatccgggcgtcgccatggcaaccaacaaggacgacgaggaccgcttcttcccatccagcggcatcctcatgtttggcaagcagggagctggaaaagacaacgtggactatagcaacgtgatgctaaccagcgaggaagaaatcaagaccaccaaccccgtggccacagaacagtatggcgtggtggctgataacctacagcagcaaaacaccgctcctattgtgggggccgtcaacagccagggagccttacctggcatggtctggcagaaccgggacgtgtacctgcagggtcctatttgggccaagattcctcacacagatggcaactttcacccgtctcctttaatgggcggctttggacttaaacatccgcctcctcagatcctcatcaaaaacactcctgttcctgcggatcctccaacagcgttcaaccaggccaagctgaattctttcatcacgcagtacagcaccggacaagtcagcgtggagatcgagtgggagctgcagaaggagaacagcaagcgctggaacccagagattcagtatacttccaactactacaaatctacaaatgtggactttgctgttaatactgagggtgtttactctgagcctcgccccattggcactcgttacctcacccgtaatctgtaa

SEQ ID NO: 5028 - protein, 738 aa, Adeno-associated virus
MAADGYLPDWLEDNLSEGIREWWDLKPGAPKPKANQQKQDDGRGLVLPGYKYLGPFNGLDKGEPVNAADAAALEHDKAYDQQLKAGDNPYLRYNHADAEFQERLQEDTSFGGNLGRAVFQAKKRVLEPLGLVEEAAKTAPGKKRPVEPSPQRSPDSSTGIGKKGQQPARKRLNFGQTGDSESVPDPQPIGEPPAGPSGLGSGTMAAGGGAPMADNNEGADGVGNASGNWHCDSTWLGDRVITTSTRTWALPTYNNHLYKQISSQSAGSTNDNVYFGYSTPWGYFDFNRFHCHFSPRDWQRLINNNWGFRPKKLNFKLFNIQVKEVTTNDGVTTIANNPTSTVQVFSDSEYQLPYVLGSAHQGCLPPFPADVFMIPQYGYLTLNNGSQSVGRSSFYCLEYFPSQMLRTGNNFTFSYTFEDVPFHSSYAHSQSLDRLMNPLIDQYLYYLARTQSNAGGTAGNRELQFYQGGPTTMAEQAKNWLPGPCYRQQRVSTTLSQNNNSNFAWTGATKYHLNGRDSLVNPGVAMATNKDDEDRFFPSSGILMFGKQGAGKDNVDYSNVMLTSEEEIKTTNPVATEQYGVVADNLQQQNTAPIVGAVNSQGALPGMVWQNRDVYLQGPIWAKIPHTDGNFHPSPLMGGFGLKHPPPQILIKNTPVPADPPTAFNQAKLNSFITQYSTGQVSVEIEWELQKENSKRWNPEIQYTSNYYKSTNVDFAVNTEGVYSEPRPIGTRYLTRNL

SEQ ID NO: 5029 - DNA, 2208 bp, Adeno-associated virus
atggctgccgatggttatcttccagattggctcgaggacaacctctctgagggcattcacgagtggtgggacccgaaacctggagccccgaaacccaaagccaaccagcaaaagcaggacgacggccggggtctggtgcttcctggctacaagtacctcggacccttcaacggactcgacaagggggagcccgtcaacgcggcggacgcagcggccctcgagcacgacaaggcctacgaccagcagctcaaagcgggtgacaatccgtacctgcggtataatcacgccgacgccgagtttcaggagcgtctgcaagaagatacgtcttttgggggcaacctcgggcgagcagtcttccaggccaagaagcgggttctcgaacctctcggtctggttgaggaaggcgctaagacggctcctggaaagaagagaccggtagagccgtcaccacagcgttcccccgactcctccacgggcatcggcaagaaaggccagcagcccgccagaaagagactcaatttcggtcagactggcgactcagagtcagtccccgaccctcaacctatcggagaacctccagcagcgccctctagtgtgggatctggtacaatggctgcaggcggtggcgcaccaatggcagacaataacgaaggtgccgacggagtgggtagttcctcgggaaattggcattgcgattccacatggctgggcgacagagtcatcaccaccagcacccgaacctgggccctgcccacccacaacaaccacctctacaagcaaatctccaacgggacctcgggaggcagcaccaacgacaacgtctacttcggctacagcaccccctgggggtattttgacttcaacagattccactgtcacttctcaccacgtgaccggcagcgactcatcaacaacaactggggattccggcccaagagactcagcttcaagctcttcaacatccaggtcaaagaggtcacgcagaatgaaggcaccaagaccatcgccaataacctcaccagcaccatccaggtgtttacggactcggaataccagctgccgtacgtcctcggctctgcccaccagggctgcctgcctccgttcccggcggacgtcttcatgattcctcagtacggctacctgactctcaacaacggtagtcaggccgtgggacgttcctccttctactgcctggagtacttcccctctcagatgctgagaacgggcaacaacttttccttcagctacactttcgaggacgtgcctttccacagcagctacgcgcacagccagagtttggacaggctgatgaatcctctcatcgaccagtacctgtactacctgtcaagaacccagtctacggaaggcacagcgggaacccagcagttgctgttttctcaggccgggcctagcaacatgtcggctcaggccagaaactggctgcctggaccctgctacagacagcagcgcgtctccacgacactgtcgcaaaacaacaacagcaactttgcctggactggtgccaccaagtatcatctgaacggcagagactctctggtgaatccgggcgtcgccatggcaacccacaaggacgacgaggaacgcttcttcccttcgagcggagtcctgatttttggaaaaactggagcagctaataagactacactggaaaatgtgttaatgacaaatgaagaggaaattcgtcctaccaacccggtagccaccgaggaatacgggactgttagcagcaacctgcaggcggctaacactgcagcccagacacaagttgtcaacaaccagggagccttacctggtatggtctggcagaaccgggacgtgtacctgcagggtcccatctgggccaagattcctcacacggacggcaactttcacccgtctccgctgatgggcggctttggactgaagcatcctcagatcctgatcaaaaacactcctgttcctgctaatcccccggaggtgtttacgcctgccaagtttgcttctttcatcacacagtacagcaccggccaggtcagcgtggagatcgagtgggagctgcagaaggagaacagcaagcgctggaacccagagattcagtatacctccaattttgacaaacagactggtgtggactttgccgttgacagccagggtgtttattctgagcctcgccccattggtactcgttacctcacccgtaatctgtaa

SEQ ID NO: 5030 - protein, 735 aa, Adeno-associated virus
MAADGYLPDWLEDNLSEGIHEWWDPKPGAPKPKANQQKQDDGRGLVLPGYKYLGPFNGLDKGEPVNAADAAALEHDKAYDQQLKAGDNPYLRYNHADAEFQERLQEDTSFGGNLGRAVFQAKKRVLEPLGLVEEGAKTAPGKKRPVEPSPQRSPDSSTGIGKKGQQPARKRLNFGQTGDSESVPDPQPIGEPPAAPSSVGSGTMAAGGGAPMADNNEGADGVGSSSGNWHCDSTWLGDRVITTSTRTWALPTHNNHLYKQISNGTSGGSTNDNVYFGYSTPWGYFDFNRFHCHFSPRDRQRLINNNWGFRPKRLSFKLFNIQVKEVTQNEGTKTIANNLTSTIQVFTDSEYQLPYVLGSAHQGCLPPFPADVFMIPQYGYLTLNNGSQAVGRSSFYCLEYFPSQMLRTGNNFSFSYTFEDVPFHSSYAHSQSLDRLMNPLIDQYLYYLSRTQSTEGTAGTQQLLFSQAGPSNMSAQARNWLPGPCYRQQRVSTTLSQNNNSNFAWTGATKYHLNGRDSLVNPGVAMATHKDDEERFFPSSGVLIFGKTGAANKTTLENVLMTNEEEIRPTNPVATEEYGTVSSNLQAANTAAQTQVVNNQGALPGMVWQNRDVYLQGPIWAKIPHTDGNFHPSPLMGGFGLKHPQILIKNTPVPANPPEVFTPAKFASFITQYSTGQVSVEIEWELQKENSKRWNPEIQYTSNFDKQTGVDFAVDSQGVYSEPRPIGTRYLTRNL

SEQ ID NO: 5031 - protein, 738 aa, Adeno-associated virus
MAADGYLPDWLEDNLSEGIREWWDLKPGAPKPKANQQKQDDGRGLVLPGYKYLGPFNGLDKGEPVNAADAAALEHDKAYDQQLKAGDNPYLRYNHADAEFQERLQEDTSFGGNLGRAVFQAKKRVLEPLGLVEEGAKTAPGKKRPVEPSPQRSPDSSTGIGKKGQQPARKRLNFGQTGDSESVPDPQPIGEPPAAPSSVGSGTMAAGGGAPMADNNEGADGVGSSSGNWHCDSTWLGDRVITTSTRTWALPTYNNHLYKQISNGTSGGSTNDNTYFGYSTPWGYFDFNRFHCHFSPRDWQRPINNNWGFRPKRLSFKLFNIQVKEVTQNEGTKTIANNLTSTIQVFTDSEYQLPYVLGSAHQGCLPPFPADVFMIPQYGYLTLNNGSQAVGRSSFYCLEYFPSQMLRTGNNFSFSYPFEDVPFHSSYAHSQSLDRLMNPLIDQYLYYLSRTQSTGGTAGTQQLLFSQAGPSNMSAQARNWLPGPCYRQQRVSTTLSQNNNSNFAWTGATKYHLNGRDSLVNPGVAMATNKDDEDRFFPSSGILMFGKQGAGKDNVDYSNVMLTSEEEIKTTNPVATEQYGVVADNLQQQDTAPIVGAVNSQGALPGMVWQNRDVYLQGPIWAKIPHTDGNFHPSPLMGGFGLKHPPPQVLIKNTPVPADPPTAFNQAKLNSFITQYSTGQVSVEIEWELQKENSKRWNPEIQYTSNYYKSTNVDFAVNTEGVYSEPRPIGTRYLTRNL

SEQ ID NO: 5032 - DNA, 2217 bp, Adeno-associated virus
atggctgccgatggttatcttccagattggctcgaggacaacctctctgagggcattcgcgagtggtgggacctgaaacctggagccccgaaacccaaggccaaccagcaaaagcaggacgacggccggggtctggtgcttcctggctacaagtacctcggacccttcaacggactcgacaagggggagcccgtcaacgcggcggacgcagcggccctcgagcacgacaaggcctacgaccagcagctcaaagcgggtgacaatccgtacctgcggtataatcacgccgacgccgagtttcaggagcgtctgcaagaagatacgtcttttgggggcaacctcgggcgagcagtcttccaggccaagaagcgggttctcgaacctctcggtctggttgaggaaggcgctaagacggctcctggaaagaagagaccggtagagccgtcaccacagcgttcccccgactcctccacgggcatcggcaagaaaggccagcagcccgccagaaagagactcaatttcggtcagactggcgactcagagtcagtccccgaccctcaacctatcggagaacctccagcagcgccctctagtgtgggatctggtacaatggctgcaggcggtggcgcaccaatggcagacaataacgaaggtgccgacggagtgggtagttcctcgggaaattggcattgcgattccacatggctgggcgacagagtcatcaccaccagcacccgaacctgggccctgcccacctacaacaaccacctctacaagcaaatctccaacgggacctcgggaggcagcaccaacgacaacacctactttggctacagcaccccctgggggtattttgactttaacagattccactgccacttctcaccacgtgactggcagcgacccatcaacaacaactggggattccggcccaagagactcagcttcaagctcttcaacatccaggtcaaagaggtcacgcagaatgaaggcaccaagaccatcgccaataacctcaccagcaccatccaggtgtttacggactcggaataccagctgccgtacgtcctcggctctgcccaccagggctgcctgcctccgttcccggcggacgtcttcatgattcctcagtacggctacctgactctcaacaacggtagtcaggccgtgggacgttcctccttctactgcctggagtacttcccctctcagatgctgagaacgggcaacaacttttccttcagctaccctttcgaggacgtgcctttccacagcagctacgcgcacagccagagtttggacaggctgatgaatcctctcatcgaccagtacctgtactacctgtcaagaacccagtctacgggaggcacagcgggaacccagcagttgctgttttctcaggccgggcctagcaacatgtcggctcaggccagaaactggctgcctggaccctgctacagacagcagcgcgtctccacgacactgtcgcaaaacaacaacagcaactttgcctggactggtgccaccaagtatcatctgaacggcagagactctctggtgaatccgggcgtcgccatggcaaccaacaaggacgacgaggaccgcttcttcccatccagcggcatcctcatgtttggcaagcagggagctggaaaagacaacgtggactatagcaacgtgatgctaaccagcgaggaagaaatcaagaccaccaaccccgtggccacagaacagtatggcgtggtggctgataacctacagcagcaagacaccgctcctattgtgggggccgtcaacagccagggagccttacctggcatggtctggcagaaccgggacgtgtacctgcagggtcctatttgggccaagattcctcacacagatggcaactttcacccgtctcctttaatgggcggctttggacttaaacatccgcctcctcaggtcctcatcaaaaacactcctgttcctgcggatcctccaacagcgttcaaccaggccaagctgaattctttcatcacgcagtacagcaccggacaagtcagcgtggagatcgagtgggagctgcagaaggagaacagcaagcgctggaacccagagattcagtatacttccaactactacaaatctacaaatgtggactttgctgttaatactgagggtgtttactctgagcctcgccccattggcactcgttacctcacccgtaatctgtaa

SEQ ID NO: 5033 - DNA, 2214 bp, Adeno-associated virus
atggctgctgacggttatcttccagattggctcgaggacaacctctctgagggcattcgcgagtggtgggacctgaaacctggagcccccaagcccaaggccaaccagcagaagcaggacgacggccggggtctggtgcttcctggctacaagtacctcggacccttcaacggactcgacaagggggagcccgtcaacgcggcggacgcagcggccctcgagcacgacaaggcctacgaccagcagctcaaagcgggtgacaatccgtacctgcggtataaccacgccgacgccgagttccaggagcgtctgcaagaagatacgtcttttgggggcaacctcgggcgagcagtcttccaggccaagaagcgggttctcgaacctctcggtctggctgaggaagctgctaagacggctcctggaaagaagagaccggtagaaccgtcacctcagcgttcccccgactcctccacgggcatcggcaagaaaggccagcagcccgctagaaagagactgaactttgggcagactggcgactcagagtcagtccccgaccctcaaccaatcggagagccaccagcaggcccctctggtctgggatctggtacaatggctgcaggcggtggcgcaccaatggctgacaataacaagggcgccgacggagtgggtaatgcctcaggaaattggcattgcgattccacatggctgggcgacagagtcatcaccaccagcacccgaacctgggctttgcccacctacaacaaccacctctacaagcaaatctccagtcagtcagcaggtagcaccaacgacaacgtctacttcggctacagcaccccctgggggtattttgacttcaacagattccactgtcacttctcaccacgtgactggcagcggctcatcaacaacaactggggattccggcccaagaagctcaacttcaagctgttcaacatccaggtcaaggaggtcacaacgggtgacggcgtcacgaccatcgccaataaccttaccagcacggttcaggtcttttcggactcggaataccagctgccctacgtcctcggctccgcacaccagggctgcctgcctccgttcccggcggacgtcttcatgattccccagtacggctacctgactctgaacaatgacagccaatcggtgggtcgttcctctttctactgcctggaatatttcccttctcaaatgctgagaacgggcaacaacttcaccttcagctacaccttcgaggacgttcccttccacagcagctacgcacacagccagagcctggaccggctgatgaatcctcttatcgaccagtacctgtattacctggccagaacacagagcaacgcaggaggcacagctggcaatcgggaactgcagttttatcagggcgggcctaccaccatggccgaacaagccaaaaactggctgcctggaccttgcttccggcaacaaagagtctccaagacgctggatcaaaacaacaacagcaactttgcttggactggtgccaccaaataccatctaaatggaagaaattcattggttaatcccggtgtcgccatggcaacccacaaggacgacgaggaacgcttcttcccttcgagcggagtcctgatttttggaaaaactggagcagctaataagactacactggaaaatgtgttaatgacaaatgaagaggaaattcgtcctaccaacccggtagccaccgaggaatacgggactgttagcagcaacctgcaggcggctaacactgcagcccagacacaagttgtcaacaaccagggagccttacctggtatggtctggcagaaccgggacgtgtacctgcagggtcccatctgggccaagattcctcacacggacggcaactttcacccgtctccgctgatgggcggctttggactgaagcatccgcctcctcagatcctgatcaaaaacactcctgttcctgctaatcccccggaggtgtttacgcctgccaagtttgcttctttcatcacacagtacagcaccggccaggtcagcgtggagatcgagtgggagctgcagaaggagaacagcaagcgctggaacccagagattcagtatacctccaattttgacaaacagactggtgtggactttgccgttgacagccagggtgtttattctgagcctcgccccattggtactcgttacctcacccgtaatctgtaa

SEQ ID NO: 5034 - protein, 737 aa, Adeno-associated virus
MAADGYLPDWLEDNLSEGIREWWDLKPGAPKPKANQQKQDDGRGLVLPGYKYLGPFNGLDKGEPVNAADAAALEHDKAYDQQLKAGDNPYLRYNHADAEFQERLQEDTSFGGNLGRAVFQAKKRVLEPLGLAEEAAKTAPGKKRPVEPSPQRSPDSSTGIGKKGQQPARKRLNFGQTGDSESVPDPQPIGEPPAGPSGLGSGTMAAGGGAPMADNNKGADGVGNASGNWHCDSTWLGDRVITTSTRTWALPTYNNHLYKQISSQSAGSTNDNVYFGYSTPWGYFDFNRFHCHFSPRDWQRLINNNWGFRPKKLNFKLFNIQVKEVTTGDGVTTIANNLTSTVQVFSDSEYQLPYVLGSAHQGCLPPFPADVFMIPQYGYLTLNNDSQSVGRSSFYCLEYFPSQMLRTGNNFTFSYTFEDVPFHSSYAHSQSLDRLMNPLIDQYLYYLARTQSNAGGTAGNRELQFYQGGPTTMAEQAKNWLPGPCFRQQRVSKTLDQNNNSNFAWTGATKYHLNGRNSLVNPGVAMATHKDDEERFFPSSGVLIFGKTGAANKTTLENVLMTNEEEIRPTNPVATEEYGTVSSNLQAANTAAQTQVVNNQGALPGMVWQNRDVYLQGPIWAKIPHTDGNFHPSPLMGGFGLKHPPPQILIKNTPVPANPPEVFTPAKFASFITQYSTGQVSVEIEWELQKENSKRWNPEIQYTSNFDKQTGVDFAVDSQGVYSEPRPIGTRYLTRNL

SEQ ID NO: 5035 - DNA, 2217 bp, Adeno-associated virus
atggctgccgatggttatcttccagattggctcgaggacaacctctctgagggcattcgcgagtggtgggacctgaaacctggagccccgaaacccaaagccaaccagcaaaagcaggacgacggccggggtctggtgcttcctggctacaagtacctcggacccttcaacggactcgacaagggggagcccgtcaacgcggcggacgcagcggccctcgagcacgacaaggcctacgaccagcagctcaaagcgggtgacaatccgtacctgcggtataatcacgccgacgccgagtttcaggagcgtctgcaagaagatacgtcttttgggggcaacctcgggcgagcagtcttccaggccaagaagcgggttctcgaacctctcggtctggttgaggaaggcgctaagacggctcctggaaagaagagaccggtagagccgtcaccacagcgttcccccgactcctccacgggcatcggcaagaaaggccagcagcccgccagaaagagactcaatttcggtcagactggcgactcagagtcagtccccgaccctcaacctatcggagaacctccagcagcgccctctagtgtgggatctggtacaatggctgcaggcggtggcgcaccaatggcagacaataacgaaggtgccgacggagtgggtagttcctcgggaaattggcattgcgattccacatggctgggcgacagagtcatcaccaccagcacccgaacctgggccctgcccacctacaacaaccacctctacaagcaaatctccaacgggacctcgggaggcagcaccaacgacaacacctactttggctacagcaccccctgggggtattttgactttaacagattccactgccacttctcaccacgtgactggcagcgactcatcaacaacaactggggattccggcccaagagactcagcttcaagctcttcaacatccaggtcaaagaggtcacgcagaatgaaggcaccaagaccatcgccaataacctcaccagcaccatccaggtgtttacggactcggaataccagctgccgtacgtcctcggctctgcccaccagggctgcctgcctccgttcccggcggacgtcttcatgattcctcagtacggctacctgactctcaacaacggtagtcaggccgtgggacgttcctccttctactgcctggagtacttcccctctcagatgctgagaacgggcaacaacttttccttcagctacactttcgaggacgtgcctttccacagcagctacgcgcacagccagagtttggacaggctgatgaatcctctcatcgaccagtacctgtactacctgtcaagaacccagtctacgggaggcacagcgggaacccagcagttgctgttttctcaggccgggcctagcaacatgtcggctcaggccagaaactggctgcctggaccctgctacagacagcagcgcgtctccacgacactgtcgcaaaacaacaacagcaactttgcctggactggtgccaccaagtatcatctgaacggcagagactctctggtgaatccgggcgtcgccatggcaaccaacaaggacgacgaggaccgcttcttcccatccagcggcatcctcatgtttggcaagcagggagctggaaaagacaacgtggactatagcaacgtgatgctaaccagcgaggaagaaatcaagaccaccaaccccgtggccacagaacagtatggcgtggtggctgataacctacagcagcaaaacaccgctcctattgtgggggccgtcaacagccagggagccttacctggcatggtctggcagaaccgggacgtgtacctgcagggtcctatttgggccaagattcctcacacagatggcaactttcacccgtctcctttaatgggcggctttggacttaaacatccgcctcctcagatcctcatcaaaaacactcctgttcctgcggatcctccaacagcgttcaaccaggccaagctgaattctttcatcacgcagtacagcaccggacaagtcagcgtggagatcgtgtgggagctgcagaaggagaacagcaagcgcaggaacccagagattcagtatacttccaactactacaaatctacaaatgtggactttgctgttaatactgagggtgtttactctgagcctcgccccattggcactcgttacctcacccgtaatctgtaa

SEQ ID NO: 5036 - protein, 738 aa, Adeno-associated virus
MAADGYLPDWLEDNLSEGIREWWDLKPGAPKPKANQQKQDDGRGLVLPGYKYLGPFNGLDKGEPVNAADAAALEHDKAYDQQLKAGDNPYLRYNHADAEFQERLQEDTSFGGNLGRAVFQAKKRVLEPLGLVEEGAKTAPGKKRPVEPSPQRSPDSSTGIGKKGQQPARKRLNFGQTGDSESVPDPQPIGEPPAAPSSVGSGTMAAGGGAPMADNNEGADGVGSSSGNWHCDSTWLGDRVITTSTRTWALPTYNNHLYKQISNGTSGGSTNDNTYFGYSTPWGYFDFNRFHCHFSPRDWQRLINNNWGFRPKRLSFKLFNIQVKEVTQNEGTKTIANNLTSTIQVFTDSEYQLPYVLGSAHQGCLPPFPADVFMIPQYGYLTLNNGSQAVGRSSFYCLEYFPSQMLRTGNNFSFSYTFEDVPFHSSYAHSQSLDRLMNPLIDQYLYYLSRTQSTGGTAGTQQLLFSQAGPSNMSAQARNWLPGPCYRQQRVSTTLSQNNNSNFAWTGATKYHLNGRDSLVNPGVAMATNKDDEDRFFPSSGILMFGKQGAGKDNVDYSNVMLTSEEEIKTTNPVATEQYGVVADNLQQQNTAPIVGAVNSQGALPGMVWQNRDVYLQGPIWAKIPHTDGNFHPSPLMGGFGLKHPPPQILIKNTPVPADPPTAFNQAKLNSFITQYSTGQVSVEIVWELQKENSKRRNPEIQYTSNYYKSTNVDFAVNTEGVYSEPRPIGTRYLTRNL

SEQ ID NO: 5037 - protein, 738 aa, Adeno-associated virus
MAADGYLPDWLEDNLSEGIREWWDLKPGAPKPKANQQKQDDGRGLVLPGYKYLGPFNGLDKGEPVNAADAAALEHDKAYDQQLKAGDNPYLRYNHADAEFQERLQEDTSFGGNLGRAVFQAKKRVLEPLGLVEEGAKTAPGKKRPVEPSPQRSPDSSTGIGKKGQQPARKRLNFGQTGDSESVPDPQPIGEPPAAPSSVGSGTMAAGGGAPMADNNEGADGVGSSSGNWHCDSTWLGDRVITTSTRTWALPTYNNHLYKQISNGTSGGSTNDNTYFGYSTPWGYFDFNRFHCHFSPRDWQRLINNNWGFRPKRLSFKLFNIQVKEVTQNEGTKTIANNLTSTIQVFTDSEYQLPYVLGSAHQGCLPPFPADVFMIPQYGYLTLNNGSQAVGRSSFYCLEYFPSQMLRTGNNFSFSYTFEDVPFHSSYAHSQSLDRLMNPLIDQYLYYLSRTQSTGGTAGTQQLLFSQAGPSNMSAQARNWLPGPCYRQQRVSTTLSQNNNSNFAWTGATKYHLNGRDSLVNPGVAMATNKDDEDRFFPSSGILMFGKQGAGKDNVDYSNVMLTSEEEIKTTNPVATEQYGVVADNLQQQNTAPIVGAVNSQGALPGMVWQNRDVYLQGPIWAKIPHTDGNFHPSPLMGGFGLKHPPPQILIKNTPVPADPPTAFNQAKLNSFITQYSTGQVSVEIEWELQKENSKRWNPEIQYTSNYYKSTNVDFAVNTEGVYSEPRPIGTRYLTRNL

SEQ ID NO: 5038 - protein, 738 aa, Adeno-associated virus
MAADGYLPDWLEDNLSEGIREWWDLKPGAPKPKANQQKQDDGRGLVLPGYKYLGPFNGLDKGEPVNAADAAALEHDKAYDQQLKAGDNPYLRYNHADAEFQERLQEDTSFGGNLGRAVFQAKKRVLEPLGLVEEGAKTAPGKKRPVEPSPQRSPDSSTGIGKKGQQPARKRLNFGQTGDSESVPDPQPIGEPPAAPSSVGSGTMAAGGGAPMADNNEGADGVGSSSGNWHCDSTWLGDRVITTSTRTWALPTYNNHLYKQISNGTSGGSTNDNTYFGYSTPWGYFDFNRFHCHFSPRDWQRLINNNWGFRPKRLSFKLFNIQVKEVTQNEGTKTIANNLTSTIQVFTDSEYQLPYVLGSAHQGCLPPFPADVFMIPQYGYLTLNNGSQAVGRSSFYCLEYFPSQMLRTGNNFSFSYTFEDVPFHSSYAHSQSLDRLMNPLIDQYLYYLSRTQSTGGTAGTQQLLFSQAGPSNMSAQARNWLPGPCYRQQRVSTTLSQNNNSNFAWTGATKYHLNGRDSLVNPGVAMATNKDDEDRFFPSSGILMFGKQGAGKDNVDYSNVMLTSEEEIKTTNPVATEQYGVVADNLQQQNTAPIVGAVNSQGALPGMVWQNRDVYLQGPIWAKIPHTDGNFHPSPLMGGFGLKHPPPQILIKNTPVPADPPTAFNQAKLNSFITQYSTGQVSVEIVWELQKENSKRWNPEIQYTSNYYKSTNVDFAVNTEGVYSEPRPIGTRYLTRNL

SEQ ID NO: 5039 - protein, 738 aa, Adeno-associated virus; identical to SEQ ID NO: 5037

SEQ ID NO: 5040 - DNA, 2214 bp, Adeno-associated virus
atggctgctgacggttatcttccagattggctcgaggacaacctctctgagggcattcgcgagtggtgggacctgaaacctggagcccccaagcccaaggccaaccagcagaagcaggacgacggccggggtctggtgcttcctggctacaagtacctcggacccttcaacggactcgacaagggggagcccgtcaacgcggcggacgcagcggccctcgagcacgacaaggcctacgaccagcagctcaaagcgggtgacaatccgtacctgcggtataaccacgccgacgccgagtttcaggagcgtctgcaagaagatacgtcttttgggggcaacctcgggcgagcagtcttccaggccaagaagcgggttctcgaacctctcggtctggttgaggaagctgctaagacggctcctggaaagaagagaccggtagaaccgtcacctcagcgttcccccgactcctccacgggcatcggcaagaaaggccagcagcccgctagaaagagactgaactttgggcagactggcgactcagagtcagtccccgaccctcaaccaatcggagaaccaccagcaggcccctctggtctgggatctggtacaatggctgcaggcggtggcgctccaatggcagacaataacgaaggcgccgacggagtgggtaatgcctcaggaaattggcattgcgattccacatggctgggcgacagagtcatcaccaccagcacccgaacctgggctttgcccacctacaacaaccacctctacaagcaaatctccagtcagtcagcaggtagcaccaacgacaacgtctacttcggctacagcaccccctgggggtattttgacttcaacagattccactgtcacttctcaccacgtgactggcagcggctcatcaacaacaactggggattccggcccaagaagctcaacttcaagctgttcaacatccaggtcaaggaggtcacaacgaatgacggcgtcacgaccatcgccaataaccttaccagcacggttcaggtcttttcggactcggaataccagctgccctacgtcctcggctccgcacaccagggctgcctgcctccgttcccggcggacgtcttcatgattccccagtacggctacctgactctgaacaatggcagccaatcggtgggtcgttcctctttctactgcctggaatatttcccttctcaaatgctgagaacgggcaacaacttcaccttcagctacaccttcgaggacgttcccttccacagcagctacgcacacagccagagcctggaccggctgatgaatcctcttatcgaccagtacctgtattacctggccagaacacagagcaacgcaggaggcacagctggcaatcgggaactgcagttttatcagggcgggcctaccaccatggccgaacaagccaaaaactggctgcctagaccttgcttccggcaacaaagagtctccaagacgctggatcaaaacaacaacagcaactttgcttggactggtgccaccaaataccatctaaatggaagaaattcattggttaatcccggtgtcgccatggcaacccacaaggacgacgaggaacgcttcttcccttcgagcggagtcctgatttttggaaaaactggagcagctaataagactacactggaaaatgtgttaatgacaaatgaagaggaaattcgtcctaccaacccggtagccaccgaggaatacgggactgttagcagcaacctgcaggcggctaacactgcagcccagacacaagttgtcaacaaccagggagccttacctggtatggtctggcagaaccgggacgtgtacctgcagggtcccatctgggccaagattcctcacacggacggcaactttcacccgtctccgctgatgggcggctttggactgaagcatccgcctcctcagatcctgatcaaaaacactcctgttcctgctaatcccccggaggtgtttacgcctgccaagtttgcttctttcatcacacagtacagcaccggccaggtcagcgtggagatcgagtgggagctgcagaaggagaacagcaagcgctggaacccagagattcagtatacctccaattttgacaaacagactggtgtggactttgccgttgacagccagggtgtttattctgagcctcgccccattggtactcgttacctcacccgtaatctgtaa

SEQ ID NO: 5041 - protein, 737 aa, Adeno-associated virus
MAADGYLPDWLEDNLSEGIREWWDLKPGAPKPKANQQKQDDGRGLVLPGYKYLGPFNGLDKGEPVNAADAAALEHDKAYDQQLKAGDNPYLRYNHADAEFQERLQEDTSFGGNLGRAVFQAKKRVLEPLGLVEEAAKTAPGKKRPVEPSPQRSPDSSTGIGKKGQQPARKRLNFGQTGDSESVPDPQPIGEPPAGPSGLGSGTMAAGGGAPMADNNEGADGVGNASGNWHCDSTWLGDRVITTSTRTWALPTYNNHLYKQISSQSAGSTNDNVYFGYSTPWGYFDFNRFHCHFSPRDWQRLINNNWGFRPKKLNFKLFNIQVKEVTTNDGVTTIANNLTSTVQVFSDSEYQLPYVLGSAHQGCLPPFPADVFMIPQYGYLTLNNGSQSVGRSSFYCLEYFPSQMLRTGNNFTFSYTFEDVPFHSSYAHSQSLDRLMNPLIDQYLYYLARTQSNAGGTAGNRELQFYQGGPTTMAEQAKNWLPRPCFRQQRVSKTLDQNNNSNFAWTGATKYHLNGRNSLVNPGVAMATHKDDEERFFPSSGVLIFGKTGAANKTTLENVLMTNEEEIRPTNPVATEEYGTVSSNLQAANTAAQTQVVNNQGALPGMVWQNRDVYLQGPIWAKIPHTDGNFHPSPLMGGFGLKHPPPQILIKNTPVPANPPEVFTPAKFASFITQYSTGQVSVEIEWELQKENSKRWNPEIQYTSNFDKQTGVDFAVDSQGVYSEPRPIGTRYLTRNL

SEQ ID NO: 5042 - DNA, 2214 bp, Adeno-associated virus
atggctgctgacggttatcttccagattggctcgaggacaacctctctgagggcattcgcgagtggtgggacctgaaacctggagcccccaagcccaaggccaaccagcagaagcaggacgacggccggggtctggtgcttcctggctacaagtacctcggacccttcaacggactcgacaagggggagcccgtcaacgcggcggacgcagcggccctcgagcacgacaaggcctacgaccagcagctcaaagcgggtgacaatccgtacctgcggtataaccatgccgacgccgagtttcaggagcgtctgcaagaagatacgtcttttgggggcaacctcgggcgagcagtcctccaggccaagaagcgggttctcgaacctctcggtctggttgaggaagctgctaagacggctcctggaaagaagagaccggtagaaccgtcacctcagcgttcccccgactcctccacgggcatcggcaagaaaggccagcagcccgctagaaagagactgaactttgggcagactggcgactcagagtcagtccccgaccctcaaccaatcggagaaccaccagcaggcccctctggtctgggatctggtacaatggctgcaggcggtggcgctccaatggcagacaataacgaaggcgccgacggagtgggtaatgcctcaggaaattggcattgcgattccacatggctgggcgacagagtcatcaccaccagcacccgaacctgggctttgcccacctacaacaaccacctctacaagcaaatctccagtcagtcagcaggtagcaccaacgacaacgtctacttcggctacagcaccccctgggggtattttgacttcaacagattccactgtcacttctcaccacgtgactggcagcggctcatcaacaacaactggggattccggcccaagaagctcaacttcaagctgttcaacatccaggtcaaggaggtcacaacgaatgacggcgtcacgaccatcgccaataaccttaccagcacggttcaggtcttttcggactcggaataccagctgccctacgtcctcggctccgcacaccagggctgcctgcctccgttcccggcggacgtcttcatgattccccagtacggctacctgactctgaacaatggcagccaatcggtgggtcgttcctctttctactgcctggaatatttcccttctcaaatgctgagaacgggcaacaacttcaccttcagctacaccttcgaggacgttcccttccacagcagctacgcacacagccagagcctggaccggctgatgaatcctcttatcgaccagtacctgtattacctggccagaacacagagcaacgcaggaggcacagctggcaatcgggaactgcagttttatcagggcgggcctaccaccatggccgaacaagccaaaaactggctgcctggaccttgcttccggcaacaaagagtctccaagacgctggatcaaaacaacaacagcaactttgcttggactggtgccaccaaataccatctaaatggaagaaattcattggttaatcccggtgtcgccatggcaacccacaaggacgacgaggaacgcttcttcccttcgagcggagtcctgatttttggaaaaactggagcagctaataagactacactggaaaatgtgttaatgacaaatgaagaggaaattcgtcctaccaacccggtagccaccgaggaatacgggactgttagcagcaacctgcaggcggctaacactgcagcccagacacaagttgtcaacaaccagggagccttacctggtatggtctggcagaaccgggacgtgtacctgcagggtcccatctgggccaagattcctcacacggacggcaactttcacccgtctccgctgatgggcggctttggactgaagcatccgcctcctcagatcctgatcaaaaacactcctgttcctgctaatcccccggaggtgtttacgcctgccaagtttgcttctttcatcacacagtacagcaccggccaggtcagcgtggagatcgagtgggagctgcagaaggagaacagcaagcgctggaacccagagattcagtatacctccaattttgacaaacagactggtgtggactttgccgttgacagccagggtgtttattctgagcctcgccccattggtactcgttacctcacccgtaatctgtaa

SEQ ID NO: 5043 - protein, 737 aa, Adeno-associated virus; identical to SEQ ID NO: 5003

SEQ ID NO: 5044 - protein, 737 aa, Adeno-associated virus
MAADGYLPDWLEDNLSEGIREWWDLKPGAPKPKANQQKQDDGRGLVLPGYKYLGPFNGLDKGEPVNAADAAALEHDKAYDQQLKAGDNPYLRYNHADAEFQERLQEDTSFGGNLGRAVLQAKKRVLEPLGLVEEAAKTAPGKKRPVEPSPQRSPDSSTGIGKKGQQPARKRLNFGQTGDSESVPDPQPIGEPPAGPSGLGSGTMAAGGGAPMADNNEGADGVGNASGNWHCDSTWLGDRVITTSTRTWALPTYNNHLYKQISSQSAGSTNDNVYFGYSTPWGYFDFNRFHCHFSPRDWQRLINNNWGFRPKKLNFKLFNIQVKEVTTNDGVTTIANNLTSTVQVFSDSEYQLPYVLGSAHQGCLPPFPADVFMIPQYGYLTLNNGSQSVGRSSFYCLEYFPSQMLRTGNNFTFSYTFEDVPFHSSYAHSQSLDRLMNPLIDQYLYYLARTQSNAGGTAGNRELQFYQGGPTTMAEQAKNWLPGPCFRQQRVSKTLDQNNNSNFAWTGATKYHLNGRNSLVNPGVAMATHKDDEERFFPSSGVLIFGKTGAANKTTLENVLMTNEEEIRPTNPVATEEYGTVSSNLQAANTAAQTQVVNNQGALPGMVWQNRDVYLQGPIWAKIPHTDGNFHPSPLMGGFGLKHPPPQILIKNTPVPANPPEVFTPAKFASFITQYSTGQVSVEIEWELQKENSKRWNPEIQYTSNFDKQTGVDFAVDSQGVYSEPRPIGTRYLTRNL

SEQ ID NO: 5045 - DNA, 2217 bp, Adeno-associated virus
atggctgccgatggttatcttccagattggctcgaggacaacctctctgagggcattcgcgagtggtgggacctgaaacctggagccccgaaacccaaagccaaccagcaaaagcaggacgacggccggggtctggtgcttcctggctacaagtacctcggacccttcaacggactcgacaagggggagcccgtcaacgcggcggacgcagcggccctcgagcacgacaaggcctacgaccagcagctcaaagcgggtgacaatccgtacctgcggtataatcacgccgacgccgagtttcaggagcgtctgcaagaagatacgtcttttgggggcaacctcgggcgagcagtcttccaggccaagaagcgggttctcgaacctctcggtctggttgaggaaggcgctaagacggctcctggaaagaagagaccggtagagccgtcaccacagcgttcccccgactcctccacgggcatcggcaagaaaggccagcagcccgccagaaagagactcaatttcggtcagactggcgactcagagtcagtccccgaccctcaacctatcggagaacctccagcagcgccctctagtgtgggatctggtacaatggctgcaggcggtggcgcaccaatggcagacaataacgaaggtgccgacggagtgggtagttcctcgggaaattggcattgcgattccacatggctgggcgacagagtcatcaccaccagcacccgaacctgggccctgcccacctacaacaaccacctctacaagcaaatctccaacgggacctcgggaggcagcaccaacgacaacacctactttggctacagcaccccctgggggtattttgactttaacagattccactgccacttctcaccacgtgactggcagcgactcatcaacaacaactggggattccggcccaagagactcagcttcaagctcttcaacatccaggtcaaagaggtcacgcagaatgaaggcaccaagaccatcgccaataacctcaccagcaccatccaggtgtttacggactcggaataccagctgccgtacgtcctcggctctgcccaccagggctgcctgcctccgttcccggcggacgtcttcatgattcctcagtacggctacctgactctcaacaacggtagtcaggccgtgggacgttcctccttctactgcctggagtacttcccctctcagatgctgagaacgggcaacaacttttccttcagctacactttcgaggacgtgcctttccacagcagctacgcgcacagccagagtttggacaggctgatgaatcctctcatcgaccagtacctgtactacctgtcaagaacccagtctacgggaggcacagcgggaacccagcagttgctgttttctcaggccgggcctagcaacatgtcggctcaggccagaaactggctgcctggaccctgctacagacagcagcgcgtctccacgacactgtcgcaaaacaacaacagcaactttgcctggactggtgccaccaagtatcatctgaacggcagagactctctggtgaatccgggcgtcgccatggcaaccaacaaggacgacgaggaccgcttcttcccacccagcggcatcctcatgtttggcaagcagggagctggaaaagacaacgtggactatagcaacgtgatgctaaccagcgaggaagaaatcaagaccaccaaccccgtggccacagaacagtatggcgtggtggctgataacctacagcagcaaaacaccgctcctattgtgggggccgtcaacagccagggagccttacctggcatggtctggcagaaccgggacgtgtacctgcagggtcctatttgggccaagattcctcacacagatggcaactttcacccgtctcctttaatgggcggctttggacttaaacatccgcctcctcagatcctcatcaaaaacactcctgttcctgcggatcctccaacagcgttcaaccaggccaagctgaattctttcatcacgcagtacagcaccggacaagtcagcgtggtgatcgagtgggagctgcagaaggagaacagcaagcgctggaacccagagattcagtatacttccaactactacaaatctacaaatgtggactttgctgttaatactgagggtgtttactctgagcttcgccccattggcactcgttacctcacccgtaatctgtaa

SEQ ID NO: 5046 - protein, 738 aa, Adeno-associated virus
MAADGYLPDWLEDNLSEGIREWWDLKPGAPKPKANQQKQDDGRGLVLPGYKYLGPFNGLDKGEPVNAADAAALEHDKAYDQQLKAGDNPYLRYNHADAEFQERLQEDTSFGGNLGRAVFQAKKRVLEPLGLVEEGAKTAPGKKRPVEPSPQRSPDSSTGIGKKGQQPARKRLNFGQTGDSESVPDPQPIGEPPAAPSSVGSGTMAAGGGAPMADNNEGADGVGSSSGNWHCDSTWLGDRVITTSTRTWALPTYNNHLYKQISNGTSGGSTNDNTYFGYSTPWGYFDFNRFHCHFSPRDWQRLINNNWGFRPKRLSFKLFNIQVKEVTQNEGTKTIANNLTSTIQVFTDSEYQLPYVLGSAHQGCLPPFPADVFMIPQYGYLTLNNGSQAVGRSSFYCLEYFPSQMLRTGNNFSFSYTFEDVPFHSSYAHSQSLDRLMNPLIDQYLYYLSRTQSTGGTAGTQQLLFSQAGPSNMSAQARNWLPGPCYRQQRVSTTLSQNNNSNFAWTGATKYHLNGRDSLVNPGVAMATNKDDEDRFFPPSGILMFGKQGAGKDNVDYSNVMLTSEEEIKTTNPVATEQYGVVADNLQQQNTAPIVGAVNSQGALPGMVWQNRDVYLQGPIWAKIPHTDGNFHPSPLMGGFGLKHPPPQILIKNTPVPADPPTAFNQAKLNSFITQYSTGQVSVVIEWELQKENSKRWNPEIQYTSNYYKSTNVDFAVNTEGVYSELRPIGTRYLTRNL

SEQ ID NO: 5047 - DNA, 2214 bp, Adeno-associated virus
atggctgctgacggttatcttccagattggctcgaggacaacctctctgagggcattcgcgagtggtgggacctgaaacctggagcccccaagcccaaggccaaccagcagaagcaggacgacggccggggtctggtgcttcctggctacaagtacctcggacccttcaacggactcgacaagggggagcccgtcaacgcggcggacgcagcggccctcgagcacgacaaggcctacgaccagcagctcaaagcgggtgacaatccgtacctgcggtataaccacgccgacgccgagtttcaggagcgtctgcaagaagatacgtcttttgggggcaacctcgggcgagcagtcttccaggccaagaagcgggttctcgaacctctcggtctggttgaggaagctgctaagacggctcctggaaagaagagaccggtagaaccgtcacctcagcgttcccccgactcctccacgggcatcggcaagaaaggccagcagcccgctagaaagagactgaactttgggcagactggcgactcagagtcagtccccgaccctcaaccaatcggagaaccaccagcaggcccctctggtctgggatctggtacaatggctgcaggcggtggcgccccaatggcagacaataacgaaggcgccgacggagtgggtaatgcctcaggaaattggcattgcgattccacatggctgggcgacagagtcatcaccaccagcacccgaacctgggctttgcccacctacaacaaccacctctacaagcaaatctccagtcagtcagcaggtagcaccaacgacaacgtctacttcggctacagcaccccctgggggtattttgacttcaacagattccactgtcacttctcaccacgtgactggcagcggctcatcaacaacaactggggattccggcccaagaagctcaacttcaagctgttcaacatccaggtcaaggaggtcacaacgaatgacggcgtcacgaccatcgccaataaccttaccagcacggttcaggtcttttcggactcggaataccagctgccctacgtcctcggctccgcacaccagggctgcctgcctccgttcccggcggacgtcttcatgattccccagtacggctacctgactctgaacaatggcagccaatcggtgggtcgttcctctttctactgcctggaatatttcccttctcaaatgctgagaacgggcaacaacttcaccatcagctacaccttcgaggacgttcccttccacagcagctacgcacacagccagagcctggaccggctgatgaatcctcttatcgaccagtacctgtattacctggccagaacacagagcaacgcaggaggcacagctggcaatcaggaactgcagttttatcagggcgggcctaccaccatggccgaacaagccaaaaactggctgcctggaccttgcttccggcaacaaagagtctccaagacgctggatcaaaacaacaacagcaactttgcttggactggtgccaccaaataccatctaaatggaagaaattcattggttaatcccggtgtcgccatggcaacccacaaggacgacgaggaacgcttcttcccttcgagcggagtcctgatttttggaaaaactggagcagctaataagactacactggaaaatgtgttaatgacaaatgaagaggaaattcgtcctaccaacccggtagccaccgaggaatacgggactgttagcagcaacctgcaggcggctaacactgcagcccagacacaagttgtcaacaaccagggagccttacctggtatggtctggcagaaccgggacgtgtacctgcagggtcccatctgggccaagattcctcacacagatggcaactttcacccgtctcctttaatgggcggctttggacttaaacatccgcctcctcagatcctcatcaaaaacactcctgttcctgcggatcctccaacagcgttcaaccaggccaagctgaattctttcatcacgcagtacagcaccggacaagtcagcgtggagatcgagtgggagctgcagaaggagaacagcaagcgctggaacccagagattcagtatacttccaactactacaaatctacaaatgtggactttgctgttaatactgagggtgtttactctgagcctcgccccattggcactcgttacctcacccgtaatctgtaa

SEQ ID NO: 5048 - protein, 737 aa, Adeno-associated virus
MAADGYLPDWLEDNLSEGIREWWDLKPGAPKPKANQQKQDDGRGLVLPGYKYLGPFNGLDKGEPVNAADAAALEHDKAYDQQLKAGDNPYLRYNHADAEFQERLQEDTSFGGNLGRAVFQAKKRVLEPLGLVEEAAKTAPGKKRPVEPSPQRSPDSSTGIGKKGQQPARKRLNFGQTGDSESVPDPQPIGEPPAGPSGLGSGTMAAGGGAPMADNNEGADGVGNASGNWHCDSTWLGDRVITTSTRTWALPTYNNHLYKQISSQSAGSTNDNVYFGYSTPWGYFDFNRFHCHFSPRDWQRLINNNWGFRPKKLNFKLFNIQVKEVTTNDGVTTIANNLTSTVQVFSDSEYQLPYVLGSAHQGCLPPFPADVFMIPQYGYLTLNNGSQSVGRSSFYCLEYFPSQMLRTGNNFTISYTFEDVPFHSSYAHSQSLDRLMNPLIDQYLYYLARTQSNAGGTAGNQELQFYQGGPTTMAEQAKNWLPGPCFRQQRVSKTLDQNNNSNFAWTGATKYHLNGRNSLVNPGVAMATHKDDEERFFPSSGVLIFGKTGAANKTTLENVLMTNEEEIRPTNPVATEEYGTVSSNLQAANTAAQTQVVNNQGALPGMVWQNRDVYLQGPIWAKIPHTDGNFHPSPLMGGFGLKHPPPQILIKNTPVPADPPTAFNQAKLNSFITQYSTGQVSVEIEWELQKENSKRWNPEIQYTSNYYKSTNVDFAVNTEGVYSEPRPIGTRYLTRNL

SEQ ID NO: 5049 - DNA, 2217 bp, Adeno-associated virus
atggctgccgatggttatcttccagattggctcgaggacaacctctctgagggcattcgcgagtggtgggacctgaaacctggagccccgaaacccaaagccaaccagcaaaagcaggacgacggccggggtctggtgcttcctggctacaagtacctcggacccttcaacggactcgacaagggggagcccgtcaacgcggcggacgcagcggccctcgagcacgacaaggcctacgaccagcagctcaaagcgggtgacaatccgtacctgcggtataatcacgccgacgccgagtttcaggagcgtctgcaagaagatacgtcttttgggggcaacctcgggcgagcagtcttccaggccaagaagcgggttctcgaacctctcggtctggttgaggaaggcgctaagacggctcctggaaagaagagaccggtagagccgtcaccacagcgttcccccgactcctccacgggcatcggcaagaaaggccagcagcccgccagaaagagactcaatttcggtcagactggcgactcagagtcagtccccgaccctcaacctatcggagaacctccagcagcgccctctagtgtgggatctggtacaatggctgcaggcggtggcgcaccaatggcagacaataacgaaggtgccgacggagtgggtagttcctcgggaaattggcattgcgattccacatggctgggcgacagagtcatcaccaccagcacccgaacctgggccctgcccgcctacaacaaccacctctacaagcaaatctccaacgggacctcgggaggcagcaccaacgacaacacctactttggctacagcaccccctgggggtattttgactttaacagattccactgccacttctcaccacgtgactggcagcgactcatcaacaacaactggggattccggcccaagagactcagcttcaagctcttcaacatccaggtcaaagaggtcacgcagaatgaaggcaccaagaccatcgccaataacctcaccagcaccatccaggtgtttacggactcggaataccagctgccgtacgtcctcggctctgcccaccagggctgcctgcctccgttcccggcggatgtcttcatgattcctcagtacggctacctgactctcaacaacggtagtcaggccgtgggacgttcctccttctactgcctggagtacttcccctctcagatgctgagaacgggcaacaacttttccttcagctacactttcgaggacgtgcctttccacagcagctacgcgcacagccagagtttggacaggctgatgaatcctctcatcgaccagtacctgtactacctgtcaagaacccagtctacgggaggcacagcgggaacccagcagttgctgttttctcaggccgggcctagcaacatgtcggctcaggccagaaactggctgcctggaccctgctacagacagcagcgcgtctccacgacactgtcgcaaaacaacaacagcaactttgcctggactggtgccaccaagtatcatctgagcggcagagactctctggtgaatccgggcgtcgccatggcaaccaacaaggacgacgaggaccgcttcttcccatccagcggcatcctcatgtttggcaagcagggagctggaaaagacaacgtggactatagcaacgtgatgctaaccagcgaggaagaaatcaagaccaccaaccccgtggccacagaacagtatggcgtggtggctgataacctacagcagcaaaacaccgctcctattgtgggggccgtcaacagccagggagccttacctggcatggtctggcagaaccgggacgtgtacctgcagggtcctatttgggccaagattcctcacacagatggcaactttcacccgtctcctttaatgggcggctttggacttaaacatccgcctcctcagatcctcatcaaaaacactcctgttcctgcggatcctccaacagcgttcaaccaggccaagctgaattcttccatcacgcagtacagcaccggacaagtcagcgtggagatcgagtgggagctgcagaaggagaacagcaagcgctggaacccagagattcagtatacttccaactactacaaatctacaaatgtggactttgctgttaatactgagggtgtttactctgagcctcgccccattggcactcgttacctcacccgtaatttgtaa

SEQ ID NO: 5050 - protein, 738 aa, Adeno-associated virus
MAADGYLPDWLEDNLSEGIREWWDLKPGAPKPKANQQKQDDGRGLVLPGYKYLGPFNGLDKGEPVNAADAAALEHDKAYDQQLKAGDNPYLRYNHADAEFQERLQEDTSFGGNLGRAVFQAKKRVLEPLGLVEEGAKTAPGKKRPVEPSPQRSPDSSTGIGKKGQQPARKRLNFGQTGDSESVPDPQPIGEPPAAPSSVGSGTMAAGGGAPMADNNEGADGVGSSSGNWHCDSTWLGDRVITTSTRTWALPAYNNHLYKQISNGTSGGSTNDNTYFGYSTPWGYFDFNRFHCHFSPRDWQRLINNNWGFRPKRLSFKLFNIQVKEVTQNEGTKTIANNLTSTIQVFTDSEYQLPYVLGSAHQGCLPPFPADVFMIPQYGYLTLNNGSQAVGRSSFYCLEYFPSQMLRTGNNFSFSYTFEDVPFHSSYAHSQSLDRLMNPLIDQYLYYLSRTQSTGGTAGTQQLLFSQAGPSNMSAQARNWLPGPCYRQQRVSTTLSQNNNSNFAWTGATKYHLSGRDSLVNPGVAMATNKDDEDRFFPSSGILMFGKQGAGKDNVDYSNVMLTSEEEIKTTNPVATEQYGVVADNLQQQNTAPIVGAVNSQGALPGMVWQNRDVYLQGPIWAKIPHTDGNFHPSPLMGGFGLKHPPPQILIKNTPVPADPPTAFNQAKLNSSITQYSTGQVSVEIEWELQKENSKRWNPEIQYTSNYYKSTNVDFAVNTEGVYSEPRPIGTRYLTRNL

SEQ ID NO: 5051 - protein, 736 aa, Adeno-associated virus
MAADGYLPDWLEDNLSEGIREWWDLKPGAPKPKANQQKQDDGRGLVLPGYKYLGPFNGLDKGEPVNAADAAALEHDKAYDQQLKAGDNPYLRYNHADAEFQERLQEDTSFGGNLGRAVFQAKKRVLEPLGLVEEGAKTAPGKKRPVEQSPQEPDSSSGIGKTGQQPAKKRLNFGQTGDSESVPDPQPLGEPPATPAAVGPTTMASGGGAPMADNNEGADGVGNASGNWHCDSTWLGDRVITTSTRTWALPTYNNHLYKQISSASTGASNDNHYFGYSTPWGYFDFNRFHCHFSPRDWQRLINNNWGFRPKRLNFKLFNIQVKEVTTNDGVTTIANNLTSTVQVFSDSEYQLPYVLGSAHQGCLPPFPADVFMIPQYGYLTLNNGSQAVGRSSFYCLEYFPSQMLRTGNNFTFSYTFEEVPFHSSYAHSQSLDRLMNPLIDQYLYYLNRTQNQSGSAQNKDLLFSRGSPAGMSVQPKNWLPGPCYRQQRVSKTKTDNNNSNFTWTGASKYNLNGRESIINPGTAMASHKDDEDKFFPMSGVMIFGKESAGASNTALDNVMITDEEEIKATNPVATERFGTVAVNFQSSSTDPATGDVHAMGALPGMVWQDRDVYLQGPIWAKIPHTDGHFHPSPLMGGFGLKNPPPQILIKNTPVPANPPAEFSATKFASFITQYSTGQVSVEIEWELQKENSKRWNPEVQYTSNYAKSANVDFTVDNNGLYTEPRPIGTRYLTRPL

SEQ ID NO: 5052 - DNA, 2217 bp, Adeno-associated virus
atggctgctgacggttatcttccagattggctcgaggacaacctctctgagggcattcgcgagtggtgggacctgaaacctggagcccccaagcccaaggccaaccagcagaagcaggacgacggccggggtctggtgcttcctggctacaagtacctcggacccttcaacggactcgacaagggggagcccgtcaacgcggcggacgcagcggccctcgagcacgacaaggcctacgaccagcagctcaaagcgggtgacaatccgtacctgcggtataaccacgccgacgccgagtttcaggagcgtctgcaagaagatacgtcttttgggggcaacctcgggcgagcagtcttccaggccaagaagcgggttctcgaacctctcggtctggttgaggaagctgctaagacggctcctggaaagaagagaccggtagaaccgtcacctcagcgttcccccgactcctccacgggcatcggcaagaaaggccagcagcccgctaaaaagagactgaactttggtcagactggcgactcagagtcagtccccgaccctcaaccaatcggagaaccaccagcaggcccctctggtctgggatctggtacaatggctgcaggcggtggcgctccaatggcagacaataacgaaggcgccgacggagtgggtagttcctcaggaaattggcattgcgattccacatggctgggcgacagagtcatcaccaccagcacccgaacctgggccctgcccacctacaacaaccacctctacaagcaaatatccaatgggacatcgggaggaagcaccaacgacaacacctacttcggctacagcaccccctgggggtattttgacttcaacagattccactgccacttctcaccacgtgactggcagcgactcatcaacaacaactggggattccggccaaaaagactcagcttcaagctcttcaacatccaggtcaaggaggtcacgcagaatgaaggcaccaagaccatcgccaataaccttaccagcacgattcaggtatttacggactcggaataccagctgccgtacgtcctcggctccgcgcaccagggctgcctgcctccgttcccggcggacgtcttcatgattccccagtacggctaccttacactgaacaatggaagtcaagccgtaggccgttcctccttctactgcctggaatattttccatctcaaatgctgcgaactggaaacaattttgaattcagctacaccttcgaggacgtgcctttccacagcagctacgcacacagccagagcttggaccgactgatgaatcctctcatcgaccagtacctgtactacttatccagaactcagtccacaggaggaactcaaggtacccagcaattgttattttctcaagctgggcctgcaaacatgtcggctcaggctaagaactggctacctggaccttgctaccggcagcagcgagtctctacgacactgtcgcaaaacaacaacagcaactttgcttggactggtgccaccaaatatcacctgaacggaagagactctttggtaaatcccggtgtcgccatggcaacccacaaggacgacgaggaacgcttcttcccgtcgagtggagtcctgatgtttggaaaacagggtgctggaagagacaatgtggactacagcagcgttatgctaaccagcgaagaagaaattaaaaccactaaccctgtagccacagaacaatacggtgtggtggctgacaacttgcagcaaaccaatacagggcctattgtgggaaatgtcaacagccaaggagccttacctggcatggtctggcagaaccgagacgtgtacctgcagggtcccatctgggccaagattcctcacacggacggcaacttccacccttcaccgctaatgggaggatttggactgaagcacccacctcctcagatcctgatcaagaacacgccggtacctgcggatcctccaacaacgttcagccaggcgaaattggcttccttcattacgcagtacagcaccggacaggtcagcgtggaaatcgagtgggagctgcagaaggagaacagcaaacgctggaacccagagattcagtacacttcaaactactacaaatctacaaatgtggactttgctgtcaatacagagggaacttattctgagcctcgccccattggtactcgttacctcacccgtaatctgtaa

SEQ ID NO: 5053 - protein, 738 aa, Adeno-associated virus
MAADGYLPDWLEDNLSEGIREWWDLKPGAPKPKANQQKQDDGRGLVLPGYKYLGPFNGLDKGEPVNAADAAALEHDKAYDQQLKAGDNPYLRYNHADAEFQERLQEDTSFGGNLGRAVFQAKKRVLEPLGLVEEGAKTAPGKKRPVEPSPQRSPDSSTGIGKKGQQPARKRLNFGQTGDSESVPDPQPLGEPPAAPSSVGSGTMAAGGGAPMADNNEGADGVGSSSGNWHCDSTWLGDRVITTSTRTWALPTYNNHLYKQISNGTSGGSTNDNTYFGYSTPWGYFDFNRFHCHFSPRDWQRLINNNWGFRPKRLSFKLFNIQVKEVTQNEGTKTIANNLTSTIQVFTDSEYQLPYVLGSAHQGCLPPFPADVFMIPQYGYLTLNNGSQAVGRSSFYCLEYFPSQMLRTGNNFSFSYTFEDVPFHSSYAHSQSLDRLMNPLIDQYLYYLSRTQSTGGTAGTQQLLFSQAGPSNMSAQARNWLPGPCYRQQRVSTTLSQNNNSNFAWTGATKYHLNGRDSLVNPGVAMATNKDDEDRFFPSSGILMFGKQGAGKDNVDYSNVMLTSEEEIKTTNPVATEQYGVVADNLQRQNTAPIVGAVNSQGALPGMVWQNRDVYLQGPIWAKIPHTDGNFHPSPLMGGFGLKHPPPQILIKNTPVPADPPTAFNQAKLNSFITQYSTGQVSVEIEWELQKENSKRWNPEIQYTSNYYKSTNVDFAVNTEGVYSEPRPIGTRYLTRNL

SEQ ID NO: 5054 - protein, 736 aa, Adeno-associated virus
MAADGYLPDWLEDNLSEGIREWLNLKPGAPQPKANQQKQDNARGLVLPGYKYLGPFNGLDKGDPVNEADAAALEHDKAYGQQLKAGDNPYLKYNHADAEFQERLQKDTSFGGNLGKAVFQAKKRILEPLGLVETPAKTAPGKKRPVDPSPQRSPDSSSGIGKKSPHPARKRLNFGQTGEAESVPDPQPIGEPPSDPSSVGSGTMAAGGGAPMADNNEGADGVGNSSGNWHCDSTWLGDRVITTSTRTWALPTYNNHLYKQISSQSGATNDNHYFGYSTPWGYFDFNRFHCHFSPRDWQRLINNNWGFRPKRLSFKLFNIQVKEVTQNDGTTTIANNLTSTVQVFTDSEYQLPYVLGSAHQGCLPPFPADVFMIPQYGYLTLNNGSQAVGRSSFYCLEYFPSQMLRTGNNFQFSYTFEDVPFHSSYAHSQSLDRLMNPLIDQYLYYLSKTQGTNATVQGAKLQFSQAGPSNMRDQARNWLPGPCYRQQRVSKTANDNNNSEYAWTGATKYHLNGRDSLVNPGPAMASHKDDEEKFFPMNGTLVFGKNGAGNSNVDIENVMITDEEEIRTTNPVATEQYGVVSDNLQSSNTRPITGDVDSQGVLPGMVWQDRDVYLQGPIWAKIPHTDGHFHPSPLMGGFGLKHPPPQILIKNTPVPANPATTFTPGKFASFITQYSTGQVSVQIEWELQKENSKRWNPEIQYTSNYNKSVNVDFTVDTNGVYSEPRPIGTRYLTRNL

SEQ ID NO: 5055 - protein, 736 aa, Adeno-associated virus; identical to SEQ ID NO: 4750

SEQ ID NO: 5056 - protein, 736 aa, Adeno-associated virus
MAADGYLPDWLEDNLSEGIREWWDLKPGAPKPKANQQKQDDGRGLVLPGYKYLGPFNGLDKGEPVNAADAAALEHDKAYDQQLKAGDNPYLRYNHADAEFQERLQEDTSFGGNLGRAVFQAKKRVLEPLGLVEEGAKTAPGKKRPVEQSPQEPDSSSGIGKTGQQPAKKRLNFGQTGDSESVPDPQPLGEPPAAPSGLGPNTMASGGGAPMADNNEGADGVGNSSGNWHCDSTWLGDRVITTSTRTWALPTYNNHLYKQISNGTSGGSTNDNTYFGYSTPWGYFDFNRFHCHFSPRDWQRLINNNWGFRPKRLNFKLFNIQVKEVTTNEGTKTIANNLTSTVQVFTDSEYQLPYVLGSAHQGCLPPFPADVFMVPQYGYLTLNNGSQALGRSSFYCLEYFPSQMLRTGNNFQFSYTFEDVPFHSSYAHSQSLDRLMNPLIDQYLYYLVRTQTTGTGGTQTLAFSQAGPSSMANQARNWVPGPCYRQQRVSTTTNQNNNSNFAWTGAAKFKLNGRDSLMNPGVAMASHKDDEDRFFPSSGVLIFGKQGAGNDGVDYSQVLITDEEEIKATNPVATEEYGAVAINNQAANTQAQTGLVHNQGVIPGMVWQNRDVYLQGPIWAKIPHTDGNFHPSPLMGGFGLKHPPPQILIKNTPVPADPPLTFNQAKLNSFITQYSTGQVSVEIEWELQKENSKRWNPEIQYTSNYYKSTNVDFAVNTEGVYSEPRPIGTRYLTRNL

SEQ ID NO: 5057 - DNA, 2211 bp, Adeno-associated virus 1; identical to SEQ ID NO: 4940

SEQ ID NO: 5058 - protein, 736 aa, Adeno-associated virus 1; identical to SEQ ID NO: 5051

SEQ ID NO: 5059 - DNA, 4718 bp, Adeno-associated virus 1
ttgcccactccctctctgcgcgctcgctcgctcggtggggcctgcggaccaaaggtccgcagacggcagagctctgctctgccggccccaccgagcgagcgagcgcgcagagagggagtgggcaactccatcactaggggtaatcgcgaagcgcctcccacgctgccgcgtcagcgctgacgtaaattacgtcataggggagtggtcctgtattagctgtcacgtgagtgcttttgcgacattttgcgacaccacgtggccatttagggtatatatggccgagtgagcgagcaggatctccattttgaccgcgaaatttgaacgagcagcagccatgccgggcttctacgagatcgtgatcaaggtgccgagcgacctggacgagcacctgccgggcatttctgactcgtttgtgagctgggtggccgagaaggaatgggagctgcccccggattctgacatggatctgaatctgattgagcaggcacccctgaccgtggccgagaagctgcagcgcgacttcctggtccaatggcgccgcgtgagtaaggccccggaggccctcttctttgttcagttcgagaagggcgagtcctacttccacctccatattctggtggagaccacgggggtcaaatccatggtgctgggccgcttcctgagtcagattagggacaagctggtgcagaccatctaccgcgggatcgagccgaccctgcccaactggttcgcggtgaccaagacgcgtaatggcgccggaggggggaacaaggtggtggacgagtgctacatccccaactacctcctgcccaagactcagcccgagctgcagtgggcgtggactaacatggaggagtatataagcgcctgtttgaacctggccgagcgcaaacggctcgtggcgcagcacctgacccacgtcagccagacccaggagcagaacaaggagaatctgaaccccaattctgacgcgcctgtcatccggtcaaaaacctccgcgcgctacatggagctggtcgggtggctggtggaccggggcatcacctccgagaagcagtggatccaggaggaccaggcctcgtacatctccttcaacgccgcttccaactcgcggtcccagatcaaggccgctctggacaatgccggcaagatcatggcgctgaccaaatccgcgcccgactacctggtaggccccgctccgcccgcggacattaaaaccaaccgcatctaccgcatcctggagctgaacggctacgaacctgcctacgccggctccgtctttctcggctgggcccagaaaaggttcgggaagcgcaacaccatctggctgtttgggccggccaccacgggcaagaccaacatcgcggaagccatcgcccacgccgtgcccttctacggctgcgtcaactggaccaatgagaactttcccttcaatgattgcgtcgacaagatggtgatctggtgggaggagggcaagatgacggccaaggtcgtggagtccgccaaggccattctcggcggcagcaaggtgcgcgtggaccaaaagtgcaagtcgtccgcccagatcgaccccacccccgtgatcgtcacctccaacaccaacatgtgcgccgtgattgacgggaacagcaccaccttcgagcaccagcagccgttgcaggaccggatgttcaaatttgaactcacccgccgtctggagcatgactttggcaaggtgacaaagcaggaagtcaaagagttcttccgctgggcgcaggatcacgtgaccgaggtggcgcatgagttctacgtcagaaagggtggagccaacaaaagacccgcccccgatgacgcggataaaagcgagcccaagcgggcctgcccctcagtcgcggatccatcgacgtcagacgcggaaggagctccggtggactttgccgacaggtaccaaaacaaatgttctcgtcacgcgggcatgcttcagatgctgtttccctgcaagacatgcgagagaatgaatcagaatttcaacatttgcttcacgcacgggacgagagactgttcagagtgcttccccggcgtgtcagaatctcaaccggtcgtcagaaagaggacgtatcggaaactctgtgccattcatcatctgctggggcgggctcccgagattgcttgctcggcctgcgatctggtcaacgtggacctggatgactgtgtttctgagcaataaatgacttaaaccaggtatggctgccgatggttatcttccagattggctcgaggacaacctctctgagggcattcgcgagtggtgggacttgaaacctggagccccgaagcccaaagccaaccagcaaaagcaggacgacggccggggtctggtgcttcctggctacaagtacctcggacccttcaacggactcgacaagggggagcccgtcaacgcggcggacgcagcggccctcgagcacgacaaggcctacgaccagcagctcaaagcgggtgacaatccgtacctgcggtataaccacgccgacgccgagtttcaggagcgtctgcaagaagatacgtcttttgggggcaacctcgggcgagcagtcttccaggccaagaagcgggttctcgaacctctcggtctggttgaggaaggcgctaagacggctcctggaaagaaacgtccggtagagcagtcgccacaagagccagactcctcctcgggcatcggcaagacaggccagcagcccgctaaaaagagactcaattttggtcagactggcgactcagagtcagtccccgatccacaacctctcggagaacctccagcaacccccgctgctgtgggacctactacaatggcttcaggcggtggcgcaccaatggcagacaataacgaaggcgccgacggagtgggtaatgcctcaggaaattggcattgcgattccacatggctgggcgacagagtcatcaccaccagcacccgcacctgggccttgcccacctacaataaccacctctacaagcaaatctccagtgcttcaacgggggccagcaacgacaaccactacttcggctacagcaccccctgggggtattttgatttcaacagattccactgccacttttcaccacgtgactggcagcgactcatcaacaacaattggggattccggcccaagagactcaacttcaaactcttcaacatccaagtcaaggaggtcacgacgaatgatggcgtcacaaccatcgctaataaccttaccagcacggttcaagtcttctcggactcggagtaccagcttccgtacgtcctcggctctgcgcaccagggctgcctccctccgttcccggcggacgtgttcatgattccgcaatacggctacctgacgctcaacaatggcagccaagccgtgggacgttcatccttttactgcctggaatatttcccttctcagatgctgagaacgggcaacaactttaccttcagctacacctttgaggaagtgcctttccacagcagctacgcgcacagccagagcctggaccggctgatgaatcctctcatcgaccaatacctgtattacctgaacagaactcaaaatcagtccggaagtgcccaaaacaaggacttgctgtttagccgtgggtctccagctggcatgtctgttcagcccaaaaactggctacctggaccctgttatcggcagcagcgcgtttctaaaacaaaaacagacaacaacaacagcaattttacctggactggtgcttcaaaatataacctcaatgggcgtgaatccatcatcaaccctggcactgctatggcctcacacaaagacgacgaagacaagttctttcccatgagcggtgtcatgatttttggaaaagagagcgccggagcttcaaacactgcattggacaatgtcatgattacagacgaagaggaaattaaagccactaaccctgtggccaccgaaagatttgggaccgtggcagtcaatttccagagcagcagcacagaccctgcgaccggagatgtgcatgctatgggagcattacctggcatggtgtggcaagatagagacgtgtacctgcagggtcccatttgggccaaaattcctcacacagatggacactttcacccgtctcctcttatgggcggctttggactcaagaacccgcctcctcagatcctcatcaaaaacacgcctgttcctgcgaatcctccggcggagttttcagctacaaagtttgcttcattcatcacccaatactccacaggacaagtgagtgtggaaattgaatgggagctgcagaaagaaaacagcaagcgctggaatcccgaagtgcagtacacatccaattatgcaaaatctgccaacgttgattttactgtggacaacaatggactttatactgagcctcgccccattggcacccgttaccttacccgtcccctgtaattacgtgttaatcaataaaccggttgattcgtttcagttgaactttggtctcctgtccttcttatcttatcggttaccatggttatagcttacacattaactgcttggttgcgcttcgcgataaaagacttacgtcatcgggttacccctagtgatggagttgcccactccctctctgcgcgctcgctcgctcggtggggcctgcggaccaaaggtccgcagacggcagagctctgctctgccggccccaccgagcgagcgagcgcgcagagagggagtgggcaa

SEQ ID NO: 5060 - DNA, 255 bp, Adeno-associated virus 10
ggtaattcctccggaaattggcattgcgattccacatggctgggcgacagagtcatcaccaccagcacccgaacctgggtcctgcccacctacaacaaccacatctacaagcaaatctccagcgagacaggagccaccaacgacaaccactacttcggctacagcaccccctgggggtattttgactttaacagattccactgccacttttcaccacgtgactggcagcgactcatcaacaacaactggggattc

SEQ ID NO: 5061 - protein, 738 aa, Adeno-associated virus 10
MAADGYLPDWLEDNLSEGIREWWDLKPGAPKPKANQQKQDDGRGLVLPGYKYLGPFNGLDKGEPVNAADAAALEHDKAYDQQLKAGDNPYLRYNHADAEFQERLQEDTSFGGNLGRAVFQAKKRVLEPLGLVEEAAKTAPGKKRPVEPSPQRSPDSSTGIGKKGQQPAKKRLNFGQTGESESVPDPQPIGEPPAGPSGLGSGTMAAGGGAPMADNNEGADGVGSSSGNWHCDSTWLGDRVITTSTRTWALPTYNNHLYKQISNGTSGGSTNDNTYFGYSTPWGYFDFNRFHCHFSPRDWQRLINNNWGFRPKRLSFKLFNIQVKEVTQNEGTKTIANNLTSTIQVFTDSEYQLPYVLGSAHQGCLPPFPADVFMIPQYGYLTLNNGSQAVGRSSFYCLEYFPSQMLRTGNNFEFSYTFEDVPFHSSYAHSQSLDRLMNPLIDQYLYYLSRTQSTGGTQGTQQLLFSQAGPANMSAQAKNWLPGPCYRQQRVSTTLSQNNNSNFAWTGATKYHLNGRDSLVNPGVAMATHKDDEERFFPSSGVLMFGKQGAGRDNVDYSSVMLTSEEEIKTTNPVATEQYGVVADNLQQANTGPIVGNVNSQGALPGMVWQNRDVYLQGPIWAKIPHTDGNFHPSPLMGGFGLKHPPPQILIKNTPVPADPPTTFSQAKLASFITQYSTGQVSVEIEWELQKENSKRWNPEIQYTSNYYKSTNVDFAVNTEGTYSEPRPIGTRYLTRNL

SEQ ID NO: 5062 - protein, 738 aa, Adeno-associated virus 10; identical to SEQ ID NO: 4756

SEQ ID NO: 5063 - DNA, 258 bp, Adeno-associated virus 11
ggtaattcctccggaaattggcattgcgattccacatggctgggcgacagagtcatcaccaccagcacccgaacctgggccctgccaacctacaacaaccacctctacaaacaaatctccagcgcttcaacgggggccagcaacgacaaccactactttggctacagcaccccctgggggtattttgactttaacagattccactgccacttctcaccacgtgactggcagcgactcatcaacaacaactggggattc

SEQ ID NO: 5064 - DNA, 255 bp, Adeno-associated virus 12
ggtaattcctccggaaattggcattgcgattccacatggctgggcgaccgagtcattaccaccagcacccggacttgggccctgcccacctacaacaaccacctctacaagcaaatctccagccaatcgggtgccaccaacgacaaccactacttcggctacagcaccccttgggggtattttgatttcaacagattccactgccatttctcaccacgtgactggcagcgactcatcaacaacaactggggattc

SEQ ID NO: 5065 - DNA, 2208 bp, Adeno-associated virus 2
atggctgccgatggttatcttccagattggctcgaggacactctctctgaaggaataagacagtggtggaagctcaaacctggcccaccaccaccaaagcccgcagagcggcataaggacgacagcaggggtcttgtgcttcctgggtacaagtacctcggacccttcaacggactcgacaagggagagccggtcaacgaggcagacgccgcggccctcgagcacgacaaagcctacgaccggcagctcgacagcggagacaacccgtacctcaagtacaaccacgccgacgcggagtttcaggagcgccttaaagaagatacgtcttttgggggcaacctcggacgagcagtcttccaggcgaaaaagagggttcttgaacctctgggcctggttgaggaacctgttaagacggctccgggaaaaaagaggccggtagagcactctcctgtggagccagactcctcctcgggaaccggaaaggcgggccagcagcctgcaagaaaaagattgaattttggtcagactggagacgcagactcagtacctgacccccagcctctcggacagccaccagcagccccctctggtctgggaactaatacgatggctacaggcagtggcgcaccaatggcagacaataacgagggcgccgacggagtgggtaattcctcgggaaattggcattgcgattccacatggatgggcgacagagtcatcaccaccagcacccgaacctgggccctgcccacctacaacaaccacctctacaaacaaatttccagccaatcaggagcctcgaacgacaatcactactttggctacagcaccccttgggggtattttgacttcaacagattccactgccacttttcaccacgtgactggcaaagactcatcaacaacaactggggattccgacccaagagactcaacttcaagctctttaacattcaagtcaaagaggtcacgcagaatgacggtacgacgacgattgccaataaccttaccagcacggttcaggtgtttactgactcggagtaccagctcccgtacgtcctcggctcggcgcatcaaggatgcctcccgccgttcccagcagacgtcttcatggtgccacagtatggatacctcaccctgaacaacgggagtcaggcagtaggacgctcttcattttactgcctggagtactttccttctcagatgctgcgtaccggaaacaactttaccttcagctacacttttgaggacgttcctttccacagcagctacgctcacagccagagtctggaccgtctcatgaatcctctcatcgaccagtacctgtattacttgagcagaacaaacactccaagtggaaccaccacgcagtcaaggcttcagttttctcaggccggagcgagtgacattcgggaccagtctaggaactggcttcctggaccctgttaccgccagcagcgagtatcaaagacatctgcggataacaacaacagtgaatactcgtggactggagctaccaagtaccacctcaatggcagagactctctggtgaatccgggcccggccatggcaagccacaaggacgatgaagaaaagttttttcctcagagcggggttctcatctttgggaagcaaggctcagagaaaacaaatgtggacattgaaaaggtcatgattacagacgaagaggaaatcaggacaaccaatcccgtggctacggagcagtatggttctgtatctaccaacctccagagaggcaacagacaagcagctaccgcagatgtcaacacacaaggcgttcttccaggcatggtctggcaggacagagatgtgtaccttcaggggcccatctgggcaaagattccacacacggacggacattttcacccctctcccctcatgggtggattcggacttaaacaccctcctccacagattctcatcaagaacaccccggtacctgcgaatccttcgaccaccttcagtgcggcaaagtttgcttccttcatcacacagtactccacgggacaggtcagcgtggagatcgagtgggagctgcagaaggaaaacagcaaacgctggaatcccgaaattcagtacacttccaactacaacaagtctgttaatgtggactttactgtggacactaatggcgtgtattcagagcctcgccccattggcaccagatacctgactcgtaatctgtaa

SEQ ID NO: 5066 - protein, 735 aa, Adeno-associated virus 2 [sequence omitted]

SEQ ID NO: 5067 - protein, 621 aa, Adeno-associated virus 2
MPGFYEIVIKVPSDLDGHLPGISDSFVNWVAEKEWELPPDSDMDLNLIEQAPLTVAEKLQRDFLTEWRRVSKAPEALFFVQFEKGESYFHMHVLVETTGVKSMVLGRFLSQIREKLIQRIYRGIEPTLPNWFAVTKTRNGAGGGNKVVDECYIPNYLLPKTQPELQWAWTNMEQYLSACLNLTERKRLVAQHLTHVSQTQEQNKENQNPNSDAPVIRSKTSARYMELVGWLVDKGITSEKQWIQEDQASYISFNAASNSRSQIKAALDNAGKIMSLTKTAPDYLVGQQPVEDISSNRIYKILELNGYDPQYAASVFLGWATKKFGKRNTIWLFGPATTGKTNIAEAIAHTVPFYGCVNWTNENFPFNDCVDKMVIWWEEGKMTAKVVESAKAILGGSKVRVDQKCKSSAQIDPTPVIVTSNTNMCAVIDGNSTTFEHQQPLQDRMFKFELTRRLDHDFGKVTKQEVKDFFRWAKDHVVEVEHEFYVKKGGAKKRPAPSDADISEPKRVRESVAQPSTSDAEASINYADRYQNKCSRHVGMNLMLFPCRQCERMNQNSNICFTHGQKDCLECFPVSESQPVSVVKKAYQKLCYIHHIMGKVPDACTACDLVNVDLDDCIFEQ

SEQ ID NO: 5068 - DNA, 4675 bp, Adeno-associated virus 2
ttggccactccctctctgcgcgctcgctcgctcactgaggccgggcgaccaaaggtcgcccgacgcccgggctttgcccgggcggcctcagtgagcgagcgagcgcgcagagagggagtggccaactccatcactaggggttcctggaggggtggagtcgtgacgtgaattacgtcatagggttagggaggtcctgtattagaggtcacgtgagtgttttgcgacattttgcgacaccatgtggtcacgctgggtatttaagcccgagtgagcacgcagggtctccattttgaagcgggaggtttgaacgcgcagccgccatgccggggttttacgagattgtgattaaggtccccagcgaccttgacgggcatctgcccggcatttctgacagctttgtgaactgggtggccgagaaggaatgggagttgccgccagattctgacatggatctgaatctgattgagcaggcacccctgaccgtggccgagaagctgcagcgcgactttctgacggaatggcgccgtgtgagtaaggccccggaggcccttttctttgtgcaatttgagaagggagagagctacttccacatgcacgtgctcgtggaaaccaccggggtgaaatccatggttttgggacgtttcctgagtcagattcgcgaaaaactgattcagagaatttaccgcgggatcgagccgactttgccaaactggttcgcggtcacaaagaccagaaatggcgccggaggcgggaacaaggtggtggatgagtgctacatccccaattacttgctccccaaaacccagcctgagctccagtgggcgtggactaatatggaacagtatttaagcgcctgtttgaatctcacggagcgtaaacggttggtggcgcagcatctgacgcacgtgtcgcagacgcaggagcagaacaaagagaatcagaatcccaattctgatgcgccggtgatcagatcaaaaacttcagccaggtacatggagctggtcgggtggctcgtggacaaggggattacctcggagaagcagtggatccaggaggaccaggcctcatacatctccttcaatgcggcctccaactcgcggtcccaaatcaaggctgccttggacaatgcgggaaagattatgagcctgactaaaaccgcccccgactacctggtgggccagcagcccgtggaggacatttccagcaatcggatttataaaattttggaactaaacgggtacgatccccaatatgcggcttccgtctttctgggatgggccacgaaaaagttcggcaagaggaacaccatctggctgtttgggcctgcaactaccgggaagaccaacatcgcggaggccatagcccacactgtgcccttctacgggtgcgtaaactggaccaatgagaactttcccttcaacgactgtgtcgacaagatggtgatctggtgggaggaggggaagatgaccgccaaggtcgtggagtcggccaaagccattctcggaggaagcaaggtgcgcgtggaccagaaatgcaagtcctcggcccagatagacccgactcccgtgatcgtcacctccaacaccaacatgtgcgccgtgattgacgggaactcaacgaccttcgaacaccagcagccgttgcaagaccggatgttcaaatttgaactcacccgccgtctggatcatgactttgggaaggtcaccaagcaggaagtcaaagactttttccggtgggcaaaggatcacgtggttgaggtggagcatgaattctacgtcaaaaagggtggagccaagaaaagacccgcccccagtgacgcagatataagtgagcccaaacgggtgcgcgagtcagttgcgcagccatcgacgtcagacgcggaagcttcgatcaactacgcagacaggtaccaaaacaaatgttctcgtcacgtgggcatgaatctgatgctgtttccctgcagacaatgcgagagaatgaatcagaattcaaatatctgcttcactcacggacagaaagactgtttagagtgctttcccgtgtcagaatctcaacccgtttctgtcgtcaaaaaggcgtatcagaaactgtgctacattcatcatatcatgggaaaggtgccagacgcttgcactgcctgcgatctggtcaatgtggatttggatgactgcatctttgaacaataaatgatttaaatcaggtatggctgccgatggttatcttccagattggctcgaggacactctctctgaaggaataagacagtggtggaagctcaaacctggcccaccaccaccaaagcccgcagagcggcataaggacgacagcaggggtcttgtgcttcctgggtacaagtacctcggacccttcaacggactcgacaagggagagccggtcaacgaggcagacgccgcggccctcgagcacgtacaaagcctacgaccggcagctcgacagcggagacaacccgtacctcaagtacaaccacgccgacgcggagtttcaggagcgccttaaagaagatacgtcttttgggggcaacctcggacgagcagtcttccaggcgaaaaagagggttcttgaacctctgggcctggttgaggaacctgttaagacggctccgggaaaaaagaggccggtagagcactctcctgtggagccagactcctcctcgggaaccggaaaggcgggccagcagcctgcaagaaaaagattgaattttggtcagactggagacgcagactcagtacctgacccccagcctctcggacagccaccagcagccccctctggtctgggaactaatacgatggctacaggcagtggcgcaccaatggcagacaataacgagggcgccgacggagtgggtaattcctccggaaattggcattgcgattccacatggatgggcgacagagtcatcaccaccagcacccgaacctgggccctgcccacctacaacaaccacctctacaaacaaatttccagccaatcaggagcctcgaacgacaatcactactttggctacagcaccccttgggggtattttgacttcaacagattccactgccacttttcaccacgtgactggcaaagactcatcaacaacaactggggattccgacccaagagactcaacttcaagctctttaacattcaagtcaaagaggtcacgcagaatgacggtacgacgacgattgccaataaccttaccagcacggttcaggtgtttactgactcggagtaccagctcccgtacgtcctcggctcggcgcatcaaggatgcctcccgccgttcccagcagacgtcttcatggtgccacagtatggatacctcaccctgaacaacgggagtcaggcagtaggacgctcttcattttactgcctggagtactttccttctcagatgctgcgtaccggaaacaactttaccttcagctacacttttgaggacgttcctttccacagcagctacgctcacagccagagtctggaccgtctcatgaatcctctcatcgaccagtacctgtattacttgagcagaacaaacactccaagtggaaccaccacgcagtcaaggcttcagttttctcaggccggagcgagtgacattcgggaccagtctaggaactggcttcctggaccctgttaccgccagcagcgagtatcaaagacatctgcggataacaacaacagtgaatactcgtggactggagctaccaagtaccacctcaatggcagagactctctggtgaatccggccatggcaagccacaaggacgatgaagaaaagttttttcctcagagcggggttctcatctttgggaagcaaggctcagagaaaacaaatgtgaacattgaaaaggtcatgattacagacgaagaggaaatcggaacaaccaatcccgtggctacggagcagtatggttctgtatctaccaacctccagagaggcaacagacaagcagctaccgcagatgtcaacacacaaggcgttcttccaggcatggtctggcaggacagagatgtgtaccttcaggggcccatctgggcaaagattccacacacggacggacattttcacccctctcccctcatgggtggattcggacttaaacaccctcctccacagattctcatcaagaacaccccggtacctgcgaatccttcgaccaccttcagtgcggcaaagtttgcttccttcatcacacagtactccacgggacacggtcagcgtggagatcgagtgggagctgcagaaggaaaacagcaaacgctggaatcccgaaattcagtacacttccaactacaacaagtctgttaatcgtggacttaccgtggatactaatggcgtgtattcagagcctcgccccattggcaccagatacctgactcgtaatctgtaattgcttgttaatcaataaaccgtttaattcgtttcagttgaactttggtctctgcgtatttctttcttatctagtttccatggctacgtagataagtagcatggcgggttaatcattaactacaaggaacccctagtgatggagttggccactccctctctgcgcgctcgctcgctcactgaggccgggcgaccaaaggtcgcccgacgcccgggctttgcccgggcggcctcagtgagcgagcgagcgcgcagagagggagtggccaa

SEQ ID NO: 5069 - DNA, 4679 bp, Adeno-associated virus 2
ttggccactccctctctgcgcgctcgctcgctcactgaggccgggcgaccaaaggtcgcccgacgcccgggctttgcccgggcggcctcagtgagcgagcgagcgcgcagagagggagtggccaactccatcactaggggttcctggaggggtggagtcgtgacgtgaattacgtcatagggttagggaggtcctgtattagaggtcacgtgagtgttttgcgacattttgcgacaccatgtggtcacgctgggtatttaagcccgagtgagcacgcagggtctccattttgaagcgggaggtttgaacgcgcagccgccatgccggggttttacgagattgtgattaaggtccccagcgaccttgacgggcatctgcccggcatttctgacagctttgtgaactgggtggccgagaaggaatgggagttgccgccagattctgacatggatctgaatctgattgagcaggcacccctgaccgtggccgagaagctgcagcgcgactttctgacggaatggcgccgtgtgagtaaggccccggaggcccttttctttgtgcaatttgagaagggagagagctacttccacatgcacgtgctcgtggaaaccaccggggtgaaatccatggttttgggacgtttcctgagtcagattcgcgaaaaactgattcagagaatttaccgcgggatcgagccgactttgccaaactggttcgcggtcacaaagaccagaaatggcgccggaggcgggaacaaggtggtggatgagtgctacatccccaattacttgctccccaaaacccagcctgagctccagtgggcgtggactaatatggaacagtatttaagcgcctgtttgaatctcacggagcgtaaacggttggtggcgcagcatctgacgcacgtgtcgcagacgcaggagcagaacaaagagaatcagaatcccaattctgatgcgccggtgatcagatcaaaaacttcagccaggtacatggagctggtcgggtggctcgtggacaaggggattacctcggagaagcagtggatccaggaggaccaggcctcatacatctccttcaatgcggcctccaactcgcggtcccaaatcaaggctgccttggacaatgcgggaaagattatgagcctgactaaaaccgcccccgactacctggtgggccagcagcccgtggaggacatttccagcaatcggatttataaaattttggaactaaacgggtacgatccccaatatgcggcttccgtctttctgggatgggccacgaaaaagttcggcaagaggaacaccatctggctgtttgggcctgcaactaccgggaagaccaacatcgcggaggccatagcccacactgtgcccttctacgggtgcgtaaactggaccaatgagaactttcccttcaacgactgtgtcgacaagatggtgatctggtgggaggaggggaagatgaccgccaaggtcgtggagtcggccaaagccattctcggaggaagcaaggtgcgcgtggaccagaaatgcaagtcctcggcccagatagacccgactcccgtgatcgtcacctccaacaccaacatgtgcgccgtgattgacgggaactcaacgaccttcgaacaccagcagccgttgcaagaccggatgttcaaatttgaactcacccgccgtctggatcatgactttgggaaggtcaccaagcaggaagtcaaagactttttccggtgggcaaaggatcacgtggttgaggtggagcatgaattctacgtcaaaaagggtggagccaagaaaagacccgcccccagtgacgcagatataagtgagcccaaacgggtgcgcgagtcagttgcgcagccatcgacgtcagacgcggaagcttcgatcaactacgcagacaggtaccaaaacaaatgttctcgtcacgtgggcatgaatctgatgctgtttccctgcagacaatgcgagagaatgaatcagaattcaaatatctgcttcactcacggacagaaagactgtttagagtgctttcccgtgtcagaatctcaacccgtttctgtcgtcaaaaaggcgtatcagaaactgtgctacattcatcatatcatgggaaaggtgccagacgcttgcactgcctgcgatctggtcaatgtggatttggatgactgcatctttgaacaataaatgatttaaatcaggtatggctgccgatggttatcttccagattggctcgaggacactctctctgaaggaataagacagtggtggaagctcaaacctggcccaccaccaccaaagcccgcagagcggcataaggacgacagcaggggtcttgtgcttcctgggtacaagtacctcggacccttcaacggactcgacaagggagagccggtcaacgaggcagacgccgcggccctcgagcacgacaaagcctacgaccggcagctcgacagcggagacaacccgtacctcaagtacaaccacgccgacgcggagtttcaggagcgccttaaagaagatacgtcttttgggggcaacctcggacgagcagtcttccaggcgaaaaagagggttcttgaacctctgggcctggttgaggaacctgttaagacggctccgggaaaaaagaggccggtagagcactctcctgtggagccagactcctcctcgggaaccggaaaggcgggccagcagcctgcaagaaaaagattgaattttggtcagactggagacgcagactcagtacctgacccccagcctctcggacagccaccagcagccccctctggtctgggaactaatacgatggctacaggcagtggcgcaccaatggcagacaataacgagggcgccgacggagtgggtaattcctccggaaattggcattgcgattccacatggatgggcgacagagtcatcaccaccagcacccgaacctgggccctgcccacctacaacaaccacctctacaaacaaatttccagccaatcaggagcctcgaacgacaatcactactttggctacagcaccccttgggggtattttgacttcaacagattccactgccacttttcaccacgtgactggcaaagactcatcaacaacaactggggattccgacccaagagactcaacttcaagctctttaacattcaagtcaaagaggtcacgcagaatgacggtacgacgacgattgccaataaccttaccagcacggttcaggtgtttactgactcggagtaccagctcccgtacgtcctcggctcggcgcatcaaggatgcctcccgccgttcccagcagacgtcttcatggtgccacagtatggatacctcaccctgaacaacgggagtcaggcagtaggacgctcttcattttactgcctggagtactttccttctcagatgctgcgtaccggaaacaactttaccttcagctacacttttgaggacgttcctttccacagcagctacgctcacagccagagtctggaccgtctcatgaatcctctcatcgaccagtacctgtattacttgagcagaacaaacactccaagtggaaccaccacgcagtcaaggcttcagttttctcaggccggagcgagtgacattcgggaccagtctaggaactggcttcctggaccctgttaccgccagcagcgagtatcaaagacatctgcggataacaacaacagtgaatactcgtggactggagctaccaagtaccacctcaatggcagagactctctggtgaatccgggcccggccatggcaagccacaaggacgatgaagaaaagttttttcctcagagcggggttctcatctttgggaagcaaggctcagagaaaacaaatgtggacattgaaaaggtcatgattacagacgaagaggaaatcaggacaaccaatcccgtggctacggagcagtatggttctgtatctaccaacctccagagaggcaacagacaagcagctaccgcagatgtcaacacacaaggcgttcttccaggcatggtctggcaggacagagatgtgtaccttcaggggcccatctgggcaaagattccacacacggacggacattttcacccctctcccctcatgggtggattcggacttaaacaccctcctccacagattctcatcaagaacaccccggtacctgcgaatccttcgaccaccttcagtgcggcaaagtttgcttccttcatcacacagtactccacgggacaggtcagcgtggagatcgagtgggagctgcagaaggaaaacagcaaacgctggaatcccgaaattcagtacacttccaactacaacaagtctgttaatgtggactttactgtggacactaatggcgtgtattcagagcctcgccccattggcaccagatacctgactcgtaatctgtaattgcttgttaatcaataaaccgtttaattcgtttcagttgaactttggtctctgcgtatttctttcttatctagtttccatggctacgtagataagtagcatggcgggttaatcattaactacaaggaacccctagtgatggagttggccactccctctctgcgcgctcgctcgctcactgaggccgggcgaccaaaggtcgcccgacgcccgggctttgcccgggcggcctcagtgagcgagcgagcgcgcagagagggagtggccaa

SEQ ID NO: 5070 - protein, 735 aa, Adeno-associated virus 2
MAADGYLPDWLEDTLSEGIRQWWKLKPGPPPPKPAERHKDDSRGLVLPGYKYLGPFNGLDKGEPVNEADAAALEHDKAYDRQLDSGDNPYLKYNHADAEFQERLKEDTSFGGNLGRAVFQAKKRVLEPLGLVEEPVKTAPGKKRPVEHSPVEPDSSSGTGKAGQQPARKRLNFGQTGDADSVPDPQPLGEPPATPAAVGPTTMASGGGAPMADNNEGADGVGNASGNWHCDSTWLGDRVITTSTRTWALPTYNNHLYKQISSASTGASNDNHYFGYSTPWGYFDFNRFHCHFSPRDWQRLINNNWGFRPKRLNFKLFNIQVKEVTQNDGTTTIANNLTSTVQVFTDSEYQLPYVLGSAHQGCLPPFPADVFMIPQYGYLTLNNGSQAVGRSSFYCLEYFPSQMLRTGNNFTFSYTFEDVPFHSSYAHSQSLDRLMNPLIDQYLYYLNRTQNQSGSAQDKALLFSRGSPAGMSVQPKNWLPGPCYRQQRVSKTKTDNNNSNFTWTGASKYNLNGRESIINPGTAMASHKDDKDKFFPMSGVMIFGKESAGASNTALDNVMITDEEEIKATNPVATERFGTVAVNFQSSSTDPATGDVHVMGALPGMVWQDRDVYLQGPIWAKIPHTDGHFHPSPLMGGFGLKHPPPQILIKNTPVPANPPAEFSATKFASFITQYSTGQVSVEIEWELQKENSKRWNPEVQYTSNYAKSANVDFTVDNNGLYTEPRPIGTRYLTRP

SEQ ID NO: 5071 - protein, 740 aa, Adeno-associated virus 2
MAADGYLPDWLEDTLSEGIRQWWKLKPGPPPPKPAERHKDDSRGLVLPGYKYLGPFNGLDKGEPVNAADAAALEHDKAYDRQLDSGDNPYLKYNHADAEFQERLKEDTSFGGNLGRAVFQAKKRVLEPLGLVEEPVKTAPGKKRPVEHSPVEPDSSSGTGKAGQQPARKRLNFGQTGDADSVPDPQPLGQPPAAPSGLGTNTMATGSGAPMADNNEGADGVGNSSGNWHCDSTWMGDRVITTSTRTWALPTYNNHLYKQISSQSGASNDNHYFGYSTPWGYFDFNRFHCHFSPRDWQRLINNNWGFRPKRLNFKLFNIQVKEVTQNDGTTTIANNLTSTVQVFTDSEYQLPYVLGSAHQGCLPPFPADVFMVPQYGYLTLNNGSQAVGRSSFYCLEYFPSQMLRTGNNFTFSYTFEDVPFHSSYAHSQSLDRLMNPLIDQYLYYLSRTNTPSGTTTQSGLQFSQAGASDIRDQSRNWLPGPCYRQQRVSKTSADNNNSEYSWTGATKYHLNGRDSLVNPGPAMASHKDDEEKFFPQSGVLIFGKQGSEKTNVDIEKVMITDEEEIRTTNPVATEQYGSVSTNLQRGNRQAATADVNTQGVLPGMVWQDRDVYLQGPIWAKIPHTDGHFHPSPLMGGFGLKHPPPQILIKNTPVPANPSTTFSAAKFASFITQYSTGQVSVEIEWELQKENSKRWNPEIQYTSNYNKSVNVDFTVDTNGVYSEPRPIGTRYLTRNLLLAAA

SEQ ID NO: 5072 - protein, 734 aa, Adeno-associated virus 2
MAADGYLPDWLEDTLSEGIRQWWKLKPGPPPPKPAERHKDDSRGLVLPGYKYLGPFNGLDKGEPVNEADAAALEHDKAYDRQLDSGDNPYLKYNHADAEFQERLKEDTSFGGNLGRAVFQAKKRVLEPLGLVEEPVKTAPGKKRPVEHSPVEPDSSSGTGKAGQQPARKRLNFGQTGDADSVPDPQPLGQPPAAPSGLGTNTMATGSGAPMADNNEGADGVGNSSGNWHCDSTWMGDRVITTSTRTWALPTYNNHLYKQISSQSGASNDNHYFGYSTPWGYFDFNRFHCHFSPRDWQRLINNNWGFRPKRLNFKLFNIQVKEVTQNDGTTTIANNLTSTVQVFTDSEYQLPYVLGSAHQGCLPPFPADVFMVPQYGYLTLNNGSQAVGRSSFYCLEYFPSQMLRTGNNFTFSYTFEDVPFHSSYAHSQSLDRLMNPLIDQYLYYLSRTNTPSGTTTQSGLQFSQAGASDIRDQSRNWLPGPCYRQQRVSKTSADNNNSEYSWTGATMYHLNGRDSLVNPGPAMASHKDDEEKFFPQSGVLIFGKQGSEKTNVDIEKVMITDEEEIRTTNPVATEQYGSVSTNLQRGNRQAATADVNTQGVLPGMVWQDRDVYLQGPIWAKIPHTDGHFHPSPLMGGFGLKHPPPQILIKNTPVPANPSTTFSAAKFASFITQYSTGQVSVEIEWELQKENSKRWNPEIQYTSNYNKSINVDFTVDTNGVYSEPRPIGTRYLTRN

SEQ ID NO: 5073 - protein, 734 aa, Adeno-associated virus 2
MAADGYLPDWLEDTLSEGIRQWWKLKPGPPPPKPAERHKDDSRGLVLPGYKYLGPFNGLDKGEPVNEADAAALEHDKAYDRQLDSGDNPYLKYNHADAEFQERLKEDTSFGGNLGRAVFQAKKRVLEPLGLVEEPVKTAPGKKRPVEHSPVEPDSSSGTGKAGQQPARKRLNFGQTGDADSVPDPQPLGQPPAAPSGLGTNTMATGSGAPMADNNEGADGVGNSSGNWHCDSTWMGDRVITTSTRTWALPTYNNHLYKQISSQSGASNDNHYFGYSTPWGYFDFNRFHCHFSPRDWQRLINNNWGFRPKRLNFKLFNIQVKEVTQNDGTTTIANNLTSTVQVFTDSEYQLPYVLGSAHQGCLPPFPADVFMVPQYGYLTLNNGSQAVGRSSFYCLEYFPSQMLRTGNNFTFSYTFEDVPFHSSYAHSQSLDRLMNPLIDQYLYYLSRTNTPSGTTTQSGLQFSQAGASDIRDQSRNWLPGPCYRQQRVSKTSADNNNSEYSWTGATKYHLNGRDSLVNPGPAMASHKDDEEKFFPQSGVLIFGKQGSEKTNVDIEKVMITDEEEIRTTNPVATEQYGSVSTNLQRGNRQAATADVNTQGVLPGMVWQDRDVYLQGPIWAKIPHTDGHFHPSPLMGGFGLKHPPPQILIKNTPVPANPSTTFSEAKFASFITQYSTGQVSVEIEWELQKENSKRWNPEIQYTSNYNKSVNVDFTVDTNGVYSEPRPIGTRYLTRN

SEQ ID NO: 5074 - protein, 739 aa, Adeno-associated virus 2
MAADGYLPDWLEDTLSEGIRQWWKLKPGPPPPKPAERHKDDSRGLVLPGYKYLGPFNGLDKGEPVNEADAAALEHDKAYDRQLDSGDNPYLKYNHADAEFQERLKEDTSFGGNLGRAVFQAKKRVLEPLGLVEEPVKTAPGKKRPVEHSPVEPDSSSGTGKAGQQPARKRLNFGQTGDADSVPDPQPLGQPPAAPSGLGTNTMATGSGAPMADNNEGADGVGNSSGNWHCDSTWMGDRVITTSTRTWALPTYNNHLYKQISSQSGASNDNHYFGYSTPWGYFDFNRFHCHFSPRDWQRLINNNWGFRPKRLNFKLFNIQVKEVTQNDGTTTIANNLTSTVQVFTDSEYQLPYVLGSAHQGCLPPFPADVFMVPQYGYLTLNNGSQAVGRSSFYCLEYFPSQMLRTGNNFTFSYTFEDVPFHSSYAHSQSLDRLMNPLIDQYLYYLSRTNTPSGTTTQSGLQFSQAGASDIRDQSRNWLPGPCYRQQRVSKTSADNNNSEYSWTGATKYHLNGRDSLVNPGPAMASHKDDEEKFFPQSGVLIFGKQGSEKTNVDIEKVMITDEEEIRTTNPVATEQYGSVSTNLQRGNRQAATADVNTQGVLPGMVWQDRDVYLQGPIWAKIPHTDGHFHPSPLMGGFGLKHPPPQILIKNTPVPANPSTTFSAAKFASFITQYSTGQVSVEIEWELQKENSKRWNPEIQYTSNYNKSVNVDFTVDTNGVYSEPRPIGTRYLTRNLLLAA

SEQ ID NO: 5075 - protein, 725 aa, Adeno-associated virus 2
MAADGYLPDWLEDTLSEGIRQWWKLKPGPPPPKPAERHKDDSRGLVLPGYKYLGPFNGLDKGEPVNEADAAALEHDKAYDRQLDSGDNPYLKYNHADAEFQERLKEDTSFGGNLGRAVFQAKKRVLEPLGLVEEPVKTAPGKKRPVEHSPVEPDSSSGTGKAGQQPARKRLNFGQTGDADSVPDPQPLGQPPAAPSGLGTNTMATGSGAPMADNNEGADGVGNSSGNWHCDSTWMGDRVITTSTRTWALPTYNNHLYKQISSQSGASNDNHYFGYSTPWGYFDFNRFHCHFSPRDWQRLINNNWGFRPKRLNFKLFNIQVKEVTQNDGTTTIANNLTSTVQVFTDSEYQLPYVLGSAHQGCLPPFPADVFMVPQYGYLTLNNGSQAVGRSSFYCLEYFPSQMLRTGNNFTFSYTFEDVPFHSSYAHSQSLDRLMNPLIDQYLYYLSRTNTPSGTTTQSGLQFSQAGASDIRDQSRNWLPGPCYRQQRVSKTSADNNNSEYSWTGATKYHLNGRDSLVNPGPAMASHKDDEEKFFPQSGVLIFGKQGSEKTNVDIEKVMITDEEEIRTTNPVATEQYGSVSTNLQRGNRQAATADVNTQGVLPGMVWQDRDVYLQGPIWAKIPHTDGHFHPSPLMGGFGLKHPPPQILIKNTPVPANPSTTFSAAKFASFITQYSTGQVSVEIEWELQKENSKRWNPEIQYTSNYNKSVNVDFTVDTNGVYSEPRP

SEQ ID NO: 5076 - protein, 707 aa, Adeno-associated virus 2
MAADGYLPDWLEDTLSEGIRQWWKLKPGPPPPKPAERHKDDSRGLVLPGYKYLGPFNGLDKGEPVNEADAAALEHDKAYDRQLDSGDNPYLKYNHADAEFQERLKEDTSFGGNLGRAVFQAKKRVLEPLGLVEEPVKTAPGKKRPVEHSPVEPDSSSGTGKAGQQPARKRLNFGQTGDADSVPDPQPLGQPPAAPSGLGTNTMATGSGAPMADNNEGADGVGNSSGNWHCDSTWMGDRVITTSTRTWALPTYNNHLYKQISSQSGASNDNHYFGYSTPWGYFDFNRFHCHFSPRDWQRLINNNWGFRPKRLNFKLFNIQVKEVTQNDGTTTIANNLTSTVQVFTDSEYQLPYVLGSAHQGCLPPFPADVFMVPQYGYLTLNNGSQAVGRSSFYCLEYFPSQMLRTGNNFTFSYTFEDVPFHSSYAHSQSLDRLMNPLIDQYLYYLSRTNTPSGTTTQSGLQFSQAGASDIRDQSRNWLPGPCYRQQRVSKTSADNNNSEYSWTGATKYHLNGRDSLVNPGPAMASHKDDEEKFFPQSGVLIFGKQGSEKTNVDIEKVMITDEEEIRTTNPVATEQYGSCIYQPPERQQTSSYRRCQHTRRSSRHGLAGQRCVPSGAHLGKDSTHGRTFSPLSPHGWIRTTPSSTDSHQEHPGTCESFDHLQCGKVCFLHHTVLHGTGQRGDRVRAAEGKQQTLESRNSVHFQLQQVC

SEQ ID NO: 5077 - protein, 739 aa, Adeno-associated virus 2; identical to SEQ ID NO: 5074

SEQ ID NO: 5078 - protein, 737 aa, Adeno-associated virus 2
MASDGYLPDWLEDNLSEGIREWWDLKPGAPKPKANQQKQDDGRGLVLPGYKYLGPFNGLDKGEPVNAADAAALEHDKAYDQQLKAGDNPYLRYNHADAEFQERLQEDTSFGGNLGRAVFQAKKRVLEPFGLVEEGAKTAPGKKRPVEQSPQEPDSSSGIGKTGQQPAKKRLNFGQTGDSESVPDPQPLGEPPATPAAVGPTTMASGGGAPMADNNEGADGVGNASGNWHCDSTWLGDRVITTSTRTWALPTYNNHLYKQISSASTGASNDNHYFGYSTPWGYFDFNRFHCHFSPRDWQRLINNNWGFRPKRLNFKLFNIQVKEVTTNDGTTTIANNLTSTVQVFTDSEYQLPYVLGSAHQGCLPPFPADVFMVPQYGYLTLNNGSQAVGRSSFYCLEYFPSQMLRTGNNFTFSYTFEDVPFHSSYAHSQSLDRLMNPLIDQYLYYLSRTNTPSGTTTQSGLQFSQAGASDIRDQSRNWLPGPCYRQQRVSKTSADNNNSEYSWTGATKYHLNGRDSLVNPGPAMASHKDDEEKFFPQSGVLIFGKQGSEKTNVDIEKVMITDEEEIRTTNPVATEQYGSVSTNLQRGNRQAATADVNTQGVLPGMVWQDRDVYLQGPIWAKIPHTDGHFHPSPLMGGFGLKHHPPQILIKNTPVPANPSTTFSAAKFASFITQYSTGQVSVEIEWELQKENSKRWNPEIQYTSNYNKSVNVDFTVDTNGVYSEPRPIGTRYLTRNLL

SEQ ID NO: 5079 - protein, 741 aa, Adeno-associated virus 2
MAADGYLPDWLEDTLSEGIREWWALKPGAPKPKANQQKQDDGRGLVLPGYKYLGPFNGLDKGEPVNEADAAALEHDKAYDQQLQAGDNPYLRYNHADAEFQERLQEDTSFGGNLGRAVFQAKKRVLEPLGLVEEPVKTAPGKKRPVEHSPVEPDSSSGTGKSGQQPARKRLNFGQTGDADSVPDPQPLGQPPAAPSGLGTNTMATGSGAPMADNNEGADGVGNSSGNWHCDSTWMGDRVITTSTRTWALPTYNNHLYKQISSQSGASNDNHYFGYSTPWGYFDFNRFHCHFSPRDWQRLINNNWGFRPKRLNFKLFNIQVKEVTQNDGTTTIANNLTSTVQVFTDSEYQLPYVLGSAHQGCLPPFPADVFMVPQYGYLTLNNGSQAVGRSSFYCLEYFPSQMLRTGNNFTFSYTFEDVPFHSSYAHSQSLDRLMNPLIDQYLYYLSRTNTPSGTTTQSGLQFSQAGASDIRDQSRNWLPGPCYRQQRVSKTSADNNNSEYSWTGATKYHLNGRDSLVNPGPAMASHKDDEEKFFPQSGVLIFGKQGSEKTNVDIEKVMITDEEEIRTTNPVATEQYGSVSTNLQRGNLANHNNTTNARQAATADVNTQGVLPGMVWQDRDVYLQGPIWAKIPHTDGHFHPSPLMGGFGLKHPPPQILIKNTPVPANPSTTFSAAKFASFITQYSTGQVSVEIEWELQKENSKRWNPEIQYTSNYNKSINVDFTVDTNGVYSEPRPIGTRYL

SEQ ID NO: 5080 - protein, 730 aa, Adeno-associated virus 2
MASDGYLPDWLEDNLSEGIREWWDLKPGAPKPKANQQKQDDGRGLVLPGYKYLGPFNGLDKGEPVNAADAAALEHDKAYDQQLKAGDNPYLRYNHADAEFQERLQEDTSFGGNLGRAVFQAKKRVLEPFGLVEEGAKTAPGKKRPVEQSPQEPDSSSGIGKTGQQPAKKRLNFGQTGDSESVPDPQPLGEPPATPAAVGPTTMASGGGAPMADNNEGADGVGNASGNWHCDSTWLGDRVITTSTRTWALPTYNNHLYKQISSASTGASNDNHYFGYSTPWGYFDFNRFHCHFSPRDWQRLINNNWGFRPKRLNFKLFNIQVKEVTTNDGVTTIANNLTSTVQVFSDSEYQLPYVLGSAHQGCLPPFPADVFMIPQYGYLTLNNGSQAVGRSSFYCLEYFPSQMLRTGNNFTFSYTFEDVPFHSSYAHSQSLDRLMNPLIDQYLYYLNRTQNQSGSAQNNDLLFSRGSPAGMSVQPKNWLPGPCYRQQRVSKTKTDNNNSNFTWTGASKYNLNGRESIINPGTAMASHKDDKDKFFPMSGVMIFGKESAGASNTALDNVMITDEEEIKATNPVATERFGTVAVNLQSSSTDPATGDVHVMGALPGMVWQDRDVYLQGPIWAKIPHTDGHFHPSPLMGGFGLKNPPPQILIKNTPVPANPPAEFSATKFASFITQYSTGQVSVEIEWELQKENSKRWNPEVQYTSNYAKSANVDFTVDNNGLYTEPRPIGTR

SEQ ID NO: 5081 - protein, 735 aa, Adeno-associated virus 2
  misc_feature (239)..(239): Xaa can be any naturally occurring amino acid
MASDGYLPDWLEDNLSEGIREWWDLKPGAPKPKANQQKQDDGRGLVLPGYKYLGPFNGLDKGEPVNAADAAALEHDKAYDQQLKAGDNPYLRYNHADAEFQERLQEDTSFGGNLGRAVFQAKKRVLEPFGLVEEGAKTAPGKKRPVEQSPQEPDSSSGIGKTGQQPAKKRLNFGQTGDSESVPDPQPLGEPPATPAAVGPTTMASGGGAPMADNNEGADGVGNASGNWHCDSTWLGDRXITTSTRTWALPTYNNHLYKQISSASTGASNDNHYFGYSTPWGYFDFNRFHCHFSPRDWQRLINNNWGFRPKRLNFKLFNIQVKEVTTNDGVTTIANNLTSTVQVFSDSEYQLPYVLGSAHQGCLPPFPADVFMIPQYGYLTLNNGSQAVGRSSFYCLEYFPSQMLRTGNNFTFSYTFEDVPFHSSYAHSQSLDRLMNPLIDQYLYYLNRTQNQSGSAQNNDLLFSRGSPAGMSVQPKNWLPGPCYRQQRVSKTKTDNNNSNFTWTGASKYNLNGRESIINPGTAMASHKDDKDKFFPMSGVMIFGKESAGASNTALDNVMITDEEEIKATNPVATERFGTVAVNLQSSSTDPATGDVHVMGALPGMVWQDRDVYLQGPIWAKIPHTDGHFHPSPLMGGFGLKNPPPQILIKNTPVPANPPAEFSATKFASFITQYSTGQVSVEIEWELQKENSKRWNPEVQYTSNYAKSANVDFTVDNNGLYTEPRPIGTRYLTRP

SEQ ID NO: 5082 - protein, 733 aa, Adeno-associated virus 2
MASDGYLPDWLEDNLSEGIREWWDLKPGAPKPKANQQKQDDGRGLVLPGYKYLGPFNGLDKGEPVNAADAAALEHDKAYDQQLKAGDNPYLRYNHADAEFQERLQEDTSFGGNLGRAVFLAKKRVLEPFGLVEEGAKTAPGKKRPVEQSPQEPDSSSGIGKTGQQPAKKRLNFGQTGDSESVPDPQPLGEPPATPAAVGPTTMASGGGAPMADNNEGADGVGNASGNWHCDSTWLGDRVITTSTRTWALPTYNNHLYKQISSASTGASNDNHYFGYSTPWGYFDFNRFHCHFSPRDWQRLINNNWGFRPKRLNFKLFNIQVKEVTTNDGVTTIANNLTSTVQVFSDSEYQLPYVLGSAHQGCLPPFPADVFMIPQYGYLTLNNGSQAVGRSSFYCLEYFPSQMLRTGNNFTFSYTFEDVPFHSSYAHSQSLDRLMNPLIDQYLYYLNRTQNQSGSAQNNDLLFSRGSPAGMSVQPKNWLPGPCYRQQRVSKTKTDNNNSNFTWTGASKYNLNGRESIINPGTAMASHKDDKDKFFPMSGVMIFGKESAGASNTALDNVMITDEEEIKATNPVATERFGTVAVNLQSSSTDPATGDVHVMGALPGMVWQDRDVYLQGPIWAKIPHTDGHFHPSPLMGGFGLKNPPPQILIKNTPVPANPPAEFSATKFASFITQYSTGQVSVEIEWELQKENSKRWNPEVQYTSNYAKSANVDFTVDNNGLYTEPRPIGTRYLT

SEQ ID NO: 5083 - protein, 734 aa, Adeno-associated virus 2
MAADGYLPDWLEDTLSEGIRQWWKLKPGPPPPKPAERHKDDSRGLVLPGCKYLGPFNGLDKGEPVNEADAAALEHDKAYDRQLDSGDNPYLKYNHADAEFQERLKEDTSFGGNLGRAVFQAKKRVLEPLGLVEEPVKTAPGKKRPVEHSPVEPDSSSGTGKAGQQPARKRLNFGQTGDADSVPDPQPLGQPPAAPSGLGTNTMATGSGAPMADNNEGADGVGNSSGNWHCDSTWMGDRVITTSTRTWALPTYNNHLYKQISSQSGASNDNHYFGYSTPWGYFDFNRFHCHFSPRDWQRLINNNWGFRPKRLNFKLFNIQVKEVTQNDGTTTIANNLTSTVQVFSDSEYQLPYVLGSAHQGCLPPFPADVFMIPQYGYLTLNNGSQAVGRSSFYCLEYFPSQMLRTGNNFTFNYTFEDVPFHSSYAHSQSLDRLMNPLIDQYLYYLNRTQNQSGSAQNNDLLFSRGSPAGMSVQPKNWLPGPCYRQQRVSKTKTDNNNSNFTWTGASKYNLNGRESIINPGTAMASHKDDKDKFFPMSGVMIFGKESAGASNTALDNVMITDEEEIKATNPVATERFGTVAVNLQSSSTDPATGDVHVMGALPGMVWQDRDVYLQGPIWAKIPHTDGHFHPSPLMGGFGLKNPPPQILIKNTPVPANPPAEFSATKFASFITQYSTGQVSVEIEWELQKENSKRWNPEVQYTSNYAKSANVDFTVDNNGLYTEPRPIGTRYLTRP

SEQ ID NO: 5084 - protein, 734 aa, Adeno-associated virus 2
MAADGYLPDWLEDTLSEGIRQWWKLKPGPPPPKPAERHKDDSRGLVLPGYKYLGPFNGLDKGEPVNEADAAALEHDKAYDRQLDSGDNPYLKYNHADAEFQERLKEDTSFGGNLGRAVFQAKKRVLEPLGLVEEPVKTAPGKKRPVEHSPVEPDSSSGTGKAGQQPARKRLNFGQTGDADSVPDPQPLGQPPAAPSGLGTNTMATGSGAPMADNNEGADGVGNSSGNWHCDSTWMGDRVITTSTRTWALSTYNNHLYKQISSQSGASNDNHYFGYSTPWGYFDFNRFHCHFSPRDWQRLINNNWGFRPKRLNFKLFNIQVKEVTQNDGTTTIANNLTSTVQVFTDSEYQLPYVLGSAHQGCLPPFPADVFMVPQYGYLTLNNGSQAVGRSSFYCLEYFPSQMLRTGNNFTFSYTFEDVPFHSSYAHSQSLDRLMNPLIDQYLYYLSRTNTPSGTTTQSRLQFSQAGASDIRDQSRNWLPGPCYRQQRVSKTSADNNNSEYSWTGATKYHLNGRDSLVNPGPAMASHKDDEEKFFPQSGVLIFGKQGSEKTNVDIEKVMITDEEEIRTTNPVATEQYGSVSTNLQRGNRQAATADVNTQGVLPGMVWQDRDVYLQGPIWAKIPHTDGHFHPSPLMGGFGLKHPPPQILIKNTPVPANPSTTFSAAKFASFITQYSTGQVSVEIEWELQKENSKRWNPEIQYTSNYNKSINVDFTVDTNGVYSEPRPIGTRYLTRN

SEQ ID NO: 5085 - protein, 738 aa, Adeno-associated virus 2
MAADGYLPDWLEDTLSEGIRQWWKLKPGPPPPKPAERHKDDSRGLVLPGYKYLGPFNGLDKGEPVNEADAAALEHDKAYDRQLDGGDNPYLKYNHADAEFQERLKEDTSFGGNLGRAVFQAKKRVLEPLGLVEEPVKTAPGKKRPVEHSPVEPDSSSGTGKAGQQPARKRLNFGQTGDADSVPDPQPLGQPPAAPSGLGTNTMATGSGAPMADNNEGADGVGNSSGNWHCDSTWMGDRVITTSTRTWALPTYNNHLYKQISSQSGASNDNHYFGYSTPWGYFDFNRFHCHFSPRDWQRLINNNWGFRPKRLNFKLFNIQVKEVTQNDGTTTIANNLTSTVQVFTDSEYQLPYVLGSAHQGCLPPFPADVFMVPQYGYLTLNNGSQAVGRSSFYCLEYFPSQMLRTGNNFTFSYTFEDVPFHSSYAHSQSLDRLMNPLIDQYLYYLSRTNTPSGTTTQSGLQFSQAGASDIRDQSRNWLPGPCYRQQRVSKTSADNNNSEYSWTGATKYHLNGRDSLVNPGPAMASHKDDEEKFFPQSGVLIFGKQGSEKTNVDIEKVMITDEEEIRTTNPVATEQYGSVSTNLQRGNRQAATADVNTQGVLPGMVWQDRDVYLQGPIWAKIPHTDGHFHPSPLMGGFGLKHPPPQILIKNTPVPANPSTTFSAAKFASFITQYSTGQVSVEIEWELQKENSKRWNPEIQYTSNYNKSVNVDFTVDTNGVYSEPRPIGTRYLTRNLLRP

SEQ ID NO: 5086 - protein, 736 aa, Adeno-associated virus 3; identical to SEQ ID NO: 4720

SEQ ID NO: 5087 - DNA, 4726 bp, Adeno-associated virus 3
ttggccactccctctatgcgcactcgctcgctcggtggggcctggcgaccaaaggtcgccagacggacgtgctttgcacgtccggccccaccgagcgagcgagtgcgcatagagggagtggccaactccatcactagaggtatggcagtgacgtaacgcgaagcgcgcgaagcgagaccacgcctaccagctgcgtcagcagtcaggtgacccttttgcgacagtttgcgacaccacgtggccgctgagggtatatattctcgagtgagcgaaccaggagctccattttgaccgcgaaatttgaacgagcagcagccatgccggggttctacgagattgtcctgaaggtcccgagtgacctggacgagcgcctgccgggcatttctaactcgtttgttaactgggtggccgagaaggaatgggacgtgccgccggattctgacatggatccgaatctgattgagcaggcacccctgaccgtggccgaaaagcttcagcgcgagttcctggtggagtggcgccgcgtgagtaaggccccggaggccctcttttttgtccagttcgaaaagggggagacctacttccacctgcacgtgctgattgagaccatcggggtcaaatccatggtggtcggccgctacgtgagccagattaaagagaagctggtgacccgcatctaccgcggggtcgagccgcagcttccgaactggttcgcggtgaccaaaacgcgaaatggcgccgggggcgggaacaaggtggtggacgactgctacatccccaactacctgctccccaagacccagcccgagctccagtgggcgtggactaacatggaccagtatttaagcgcctgtttgaatctcgcggagcgtaaacggctggtggcgcagcatctgacgcacgtgtcgcagacgcaggagcagaacaaagagaatcagaaccccaattctgacgcgccggtcatcaggtcaaaaacctcagccaggtacatggagctggtcgggtggctggtggaccgcgggatcacgtcagaaaagcaatggattcaggaggaccaggcctcgtacatctccttcaacgccgcctccaactcgcggtcccagatcaaggccgcgctggacaatgcctccaagatcatgagcctgacaaagacggctccggactacctggtgggcagcaacccgccggaggacattaccaaaaatcggatctaccaaatcctggagctgaacgggtacgatccgcagtacgcggcctccgtcttcctgggctgggcgcaaaagaagttcgggaagaggaacaccatctggctctttgggccggccacgacgggtaaaaccaacatcgcggaagccatcgcccacgccgtgcccttctacggctgcgtaaactggaccaatgagaactttcccttcaacgattgcgtcgacaagatggtgatctggtgggaggagggcaagatgacggccaaggtcgtggagagcgccaaggccattctgggcggaagcaaggtgcgcgtggaccaaaagtgcaagtcatcggcccagatcgaacccactcccgtgatcgtcacctccaacaccaacatgtgcgccgtgattgacgggaacagcaccaccttcgagcatcagcagccgctgcaggaccggatgtttgaatttgaacttacccgccgtttggaccatgactttgggaaggtcaccaaacaggaagtaaaggactttttccggtgggcttccgatcacgtgactgacgtggctcatgagttctacgtcagaaagggtggagctaagaaacgccccgcctccaatgacgcggatgtaagcgagccaaaacgggagtgcacgtcacttgcgcagccgacaacgtcagacgcggaagcaccggcggactacgcggacaggtaccaaaacaaatgttctcgtcacgtgggcatgaatctgatgctttttccctgtaaaacatgcgagagaatgaatcaaatttccaatgtctgttttacgcatggtcaaagagactgtggggaatgcttccctggaatgtcagaatctcaacccgtttctgtcgtcaaaaagaagacttatcagaaactgtgtccaattcatcatatcctgggaagggcacccgagattgcctgttcggcctgcgatttggccaatgtggacttggatgactgtgtttctgagcaataaatgacttaaaccaggtatggctgctgacggttatcttccagattggctcgaggacaacctttctgaaggcattcgtgagtggtgggctctgaaacctggagtccctcaacccaaagcgaaccaacaacaccaggacaaccgtcggggtcttgtgcttccgggttacaaatacctcggacccggtaacggactcgacaaaggagagccggtcaacgaggcggacgcggcagccctcgaacacgacaaagcttacgaccagcagctcaaggccggtgacaacccgtacctcaagtacaaccacgccgacgccgagtttcaggagcgtcttcaagaagatacgtcttttgggggcaaccttggcagagcagtcttccaggccaaaaagaggatccttgagcctcttggtctggttgaggaagcagctaaaacggctcctggaaagaagggggctgtagatcagtctcctcaggaaccggactcatcatctggtgttggcaaatcgggcaaacagcctgccagaaaaagactaaatttcggtcagactggagactcagagtcagtcccagaccctcaacctctcggagaaccaccagcagcccccacaagtttgggatctaatacaatggcttcaggcggtggcgcaccaatggcagacaataacgagggtgccgatggagtgggtaattcctcaggaaattggcattgcgattcccaatggctgggcgacagagtcatcaccaccagcaccagaacctgggccctgcccacttacaacaaccatctctacaagcaaatctccagccaatcaggagcttcaaacgacaaccactactttggctacagcaccccttgggggtattttgactttaacagattccactgccacttctcaccacgtgactggcagcgactcattaacaacaactggggattccggcccaagaaactcagcttcaagctcttcaacatccaagttagaggggtcacgcagaacgatggcacgacgactattgccaataaccttaccagcacggttcaagtgtttacggactcggagtatcagctcccgtacgtgctcgggtcggcgcaccaaggctgtctcccgccgtttccagcggacgtcttcatggtccctcagtatggatacctcaccctgaacaacggaagtcaagcggtgggacgctcatccttttactgcctggagtacttcccttcgcagatgctaaggactggaaataacttccaattcagctataccttcgaggatgtaccttttcacagcagctacgctcacagccagagtttggatcgcttgatgaatcctcttattgatcagtatctgtactacctgaacagaacgcaaggaacaacctctggaacaaccaaccaatcacggctgctttttagccaggctgggcctcagtctatgtctttgcaggccagaaattggctacctgggccctgctaccggcaacagagactttcaaagactgctaacgacaacaacaacagtaactttccttggacagcggccagcaaatatcatctcaatggccgcgactcgctggtgaatccaggaccagctatggccagtcacaaggacgatgaagaaaaatttttccctatgcacggcaatctaatatttggcaaagaagggacaacggcaagtaacgcagaattagataatgtaatgattacggatgaagaagagattcgtaccaccaatcctgtggcaacagagcagtatggaactgtggcaaataacttgcagagctcaaatacagctcccacgactggaactgtcaatcatcagggggccttacctggcatggtgtggcaagatcgtgacgtgtaccttcaaggacctatctgggcaaagattcctcacacggatggacactttcatccttctcctctgatgggaggctttggactgaaacatccgcctcctcaaatcatgatcaaaaatactccggtaccggcaaatcctccgacgactttcagcccggccaagtttgcttcatttatcactcagtactccactggacaggtcagcgtggaaattgagtgggagctacagaaagaaaacagcaaacgttggaatccagagattcagtacacttccaactacaacaagtctgttaatgtggactttactgtagacactaatggtgtttatagtgaacctcgccctattggaacccggtatctcacacgaaacttgtgaatcctggttaatcaataaaccgtttaattcgtttcagttgaactttggctcttgtgcacttctttatctttatcttgtttccatggctactgcgtagataagcagcggcctgcggcgcttgcgcttcgcggtttacaactgctggttaatatttaactctcgccatacctctagtgatggagttggccactccctctatgcgcactcgctcgctcggtggggcctggcgaccaaaggtcgccagacggacgtgctttgcacgtccggccccaccgagcgagcgagtgcgcatagagggagtggccaa

SEQ ID NO: 5088 - protein, 736 aa, Adeno-associated virus 3A; identical to SEQ ID NO: 4720

SEQ ID NO: 5089 - protein, 624 aa, Adeno-associated virus 3A
MPGFYEIVLKVPSDLDERLPGISNSFVNWVAEKEWDVPPDSDMDPNLIEQAPLTVAEKLQREFLVEWRRVSKAPEALFFVQFEKGETYFHLHVLIETIGVKSMVVGRYVSQIKEKLVTRIYRGVEPQLPNWFAVTKTRNGAGGGNKVVDDCYIPNYLLPKTQPELQWAWTNMDQYLSACLNLAERKRLVAQHLTHVSQTQEQNKENQNPNSDAPVIRSKTSARYMELVGWLVDRGITSEKQWIQEDQASYISFNAASNSRSQIKAALDNASKIMSLTKTAPDYLVGSNPPEDITKNRIYQILELNGYDPQYAASVFLGWAQKKFGKRNTIWLFGPATTGKTNIAEAIAHAVPFYGCVNWTNENFPFNDCVDKMVIWWEEGKMTAKVVESAKAILGGSKVRVDQKCKSSAQIEPTPVIVTSNTNMCAVIDGNSTTFEHQQPLQDRMFEFELTRRLDHDFGKVTKQEVKDFFRWASDHVTDVAHEFYVRKGGAKKRPASNDADVSEPKRECTSLAQPTTSDAEAPADYADRYQNKCSRHVGMNLMLFPCKTCERMNQISNVCFTHGQRDCGECFPGMSESQPVSVVKKKTYQKLCPIHHILGRAPEIACSACDLANVDLDDCVSEQ

SEQ ID NO: 5090 - protein, 736 aa, Adeno-associated virus 3B
MAADGYLPDWLEDNLSEGIREWWALKPGVPQPKANQQHQDNRRGLVLPGYKYLGPGNGLDKGEPVNEADAAALEHDKAYDQQLKAGDNPYLKYNHADAEFQERLQEDTSFGGNLGRAVFQAKKRILEPLGLVEEAAKTAPGKKRPVDQSPQEPDSSSGVGKSGKQPARKRLNFGQTGDSESVPDPQPLGEPPAAPTSLGSNTMASGGGAPMADNNEGADGVGNSSGNWHCDSQWLGDRVITTSTRTWALPTYNNHLYKQISSQSGASNDNHYFGYSTPWGYFDFNRFHCHFSPRDWQRLINNNWGFRPKKLSFKLFNIQVKEVTQNDGTTTIANNLTSTVQVFTDSEYQLPYVLGSAHQGCLPPFPADVFMVPQYGYLTLNNGSQAVGRSSFYCLEYFPSQMLRTGNNFQFSYTFEDVPFHSSYAHSQSLDRLMNPLIDQYLYYLNRTQGTTSGTTNQSRLLFSQAGPQSMSLQARNWLPGPCYRQQRLSKTANDNNNSNFPWTAASKYHLNGRDSLVNPGPAMASHKDDEEKFFPMHGNLIFGKEGTTASNAELDNVMITDEEEIRTTNPVATEQYGTVANNLQSSNTAPTTRTVNDQGALPGMVWQDRDVYLQGPIWAKIPHTDGHFHPSPLMGGFGLKHPPPQIMIKNTPVPANPPTTFSPAKFASFITQYSTGQVSVEIEWELQKENSKRWNPEIQYTSNYNKSVNVDFTVDTNGVYSEPRPIGTRYLTRNL

SEQ ID NO: 5091 - protein, 624 aa, Adeno-associated virus 3B
MPGFYEIVLKVPSDLDEHLPGISNSFVNWVAEKEWELPPDSDMDPNLIEQAPLTVAEKLQREFLVEWRRVSKAPEALFFVQFEKGETYFHLHVLIETIGVKSMVVGRYVSQIKEKLVTRIYRGVEPQLPNWFAVTKTRNGAGGGNKVVDDCYIPNYLLPKTQPELQWAWTNMDQYLSACLNLAERKRLVAQHLTHVSQTQEQNKENQNPNSDAPVIRSKTSARYMELVGWLVDRGITSEKQWIQEDQASYISFNAASNSRSQIKAALDNASKIMSLTKTAPDYLVGSNPPEDITKNRIYQILELNGYDPQYAASVFLGWAQKKFGKRNTIWLFGPATTGKTNIAEAIAHAVPFYGCVNWTNENFPFNDCVDKMVIWWEEGKMTAKVVESAKAILGGSKVRVDQKCKSSAQIEPTPVIVTSNTNMCAVIDGNSTTFEHQQPLQDRMFKFELTRRLDHDFGKVTKQEVKDFFRWASDHVTDVAHEFYVRKGGAKKRPASNDADVSEPKRQCTSLAQPTTSDAEAPADYADRYQNKCSRHVGMNLMLFPCKTCERMNQISNVCFTHGQRDCGECFPGMSESQPVSVVKKKTYQKLCPIHHILGRAPEIACSACDLANVDLDDCVSEQ

SEQ ID NO: 5092 - DNA, 4722 bp, Adeno-associated virus 3B
tggccactccctctatgcgcactcgctcgctcggtggggcctggcgaccaaaggtcgccagacggacgtgctttgcacgtccggccccaccgagcgagcgagtgcgcatagagggagtggccaactccatcactagaggtatggcagtgacgtaacgcgaagcgcgcgaagcgagaccacgcctaccagctgcgtcagcagtcaggtgacccttttgcgacagtttgcgacaccacgtggccgctgagggtatatattctcgagtgagcgaaccaggagctccattttgaccgcgaaatttgaacgagcagcagccatgccggggttctacgagattgtcctgaaggtcccgagtgacctggacgagcacctgccgggcatttctaactcgtttgttaactgggtggccgagaaggaatgggagctgccgccggattctgacatggatccgaatctgattgagcaggcacccctgaccgtggccgaaaagcttcagcgcgagttcctggtggagtggcgccgcgtgagtaaggccccggaggccctcttttttgtccagttcgaaaagggggagacctacttccacctgcacgtgctgattgagaccatcggggtcaaatccatggtggtcggccgctacgtgagccagattaaagagaagctggtgacccgcatctaccgcggggtcgagccgcagcttccgaactggttcgcggtgaccaaaacgcgaaatggcgccgggggcgggaacaaggtggtggacgactgctacatccccaactacctgctccccaagacccagcccgagctccagtgggcgtggactaacatggaccagtatttaagcgcctgtttgaatctcgcggagcgtaaacggctggtggcgcagcatctgacgcacgtgtcgcagacgcaggagcagaacaaagagaatcagaaccccaattctgacgcgccggtcatcaggtcaaaaacctcagccaggtacatggagctggtcgggtggctggtggaccgcgggatcacgtcagaaaagcaatggattcaggaggaccaggcctcgtacatctccttcaacgccgcctccaactcgcggtcccagatcaaggccgcgctggacaatgcctccaagatcatgagcctgacaaagacggctccggactacctggtgggcagcaacccgccggaggacattaccaaaaatcggatctaccaaatcctggagctgaacgggtacgatccgcagtacgcggcctccgtcttcctgggctgggcgcaaaagaagttcgggaagaggaacaccatctggctctttgggccggccacgacgggtaaaaccaacatcgcggaagccatcgcccacgccgtgcccttctacggctgcgtaaactggaccaatgagaactttcccttcaacgattgcgtcgacaagatggtgatctggtgggaggagggcaagatgacggccaaggtcgtggagagcgccaaggccattctgggcggaagcaaggtgcgcgtggaccaaaagtgcaagtcatcggcccagatcgaacccactcccgtgatcgtcacctccaacaccaacatgtgcgccgtgattgacgggaacagcaccaccttcgagcatcagcagccgctgcaggaccggatgtttaaatttgaacttacccgccgtttggaccatgactttgggaaggtcaccaaacaggaagtaaaggactttttccggtgggcttccgatcacgtgactgacgtggctcatgagttctacgtcagaaagggtggagctaagaaacgccccgcctccaatgacgcggatgtaagcgagccaaaacggcagtgcacgtcacttgcgcagccgacaacgtcagacgcggaagcaccggcggactacgcggacaggtaccaaaacaaatgttctcgtcacgtgggcatgaatctgatgctttttccctgtaaaacatgcgagagaatgaatcaaatttccaatgtctgttttacgcatggtcaaagagactgtggggaatgcttccctggaatgtcagaatctcaacccgtttctgtcgtcaaaaagaagacttatcagaaactgtgtccaattcatcatatcctgggaagggcacccgagattgcctgttcggcctgcgatttggccaatgtggacttggatgactgtgtttctgagcaataaatgacttaaaccaggtatggctgctgacggttatcttccagattggctcgaggacaacctttctgaaggcattcgtgagtggtgggctctgaaacctggagtccctcaacccaaagcgaaccaacaacaccaggacaaccgtcggggtcttgtgcttccgggttacaaatacctcggacccggtaacggactcgacaaaggagagccggtcaacgaggcggacgcggcagccctcgaacacgacaaagcttacgaccagcagctcaaggccggtgacaacccgtacctcaagtacaaccacgccgacgccgagtttcaggagcgtcttcaagaagatacgtcttttgggggcaaccttggcagagcagtcttccaggccaaaaagaggatccttgagcctcttggtctggttgaggaagcagctaaaacggctcctggaaagaagaggcctgtagatcagtctcctcaggaaccggactcatcatctggtgttggcaaatcgggcaaacagcctgccagaaaaagactaaatttcggtcagactggcgactcagagtcagtcccagaccctcaacctctcggagaaccaccagcagcccccacaagtttgggatctaatacaatggcttcaggcggtggcgcaccaatggcagacaataacgagggtgccgatggagtgggtaattcctcaggaaattggcattgcgattcccaatggctgggcgacagagtcatcaccaccagcaccagaacctgggccctgcccacttacaacaaccatctctacaagcaaatctccagccaatcaggagcttcaaacgacaaccactactttggctacagcaccccttgggggtattttgactttaacagattccactgccacttctcaccacgtgactggcagcgactcattaacaacaactggggattccggcccaagaaactcagcttcaagctcttcaacatccaagttaaagaggtcacgcagaacgatggcacgacgactattgccaataaccttaccagcacggttcaagtgtttacggactcggagtatcagctcccgtacgtgctcgggtcggcgcaccaaggctgtctcccgccgtttccagcggacgtcttcatggtccctcagtatggatacctcaccctgaacaacggaagtcaagcggtgggacgctcatccttttactgcctggagtacttcccttcgcagatgctaaggactggaaataacttccaattcagctataccttcgaggatgtaccttttcacagcagctacgctcacagccagagtttggatcgcttgatgaatcctcttattgatcagtatctgtactacctgaacagaacgcaaggaacaacctctggaacaaccaaccaatcacggctgctttttagccaggctgggcctcagtctatgtctttgcaggccagaaattggctacctgggccctgctaccggcaacagagactttcaaagactgctaacgacaacaacaacagtaactttccttggacagcggccagcaaatatcatctcaatggccgcgactcgctggtgaatccaggaccagctatggccagtcacaaggacgatgaagaaaaatttttccctatgcacggcaatctaatatttggcaaagaagggacaacggcaagtaacgcagaattagataatgtaatgattacggatgaagaagagattcgtaccaccaatcctgtggcaacagagcagtatggaactgtggcaaataacttgcagagctcaaatacagctcccacgactagaactgtcaatgatcagggggccttacctggcatggtgtggcaagatcgtgacgtgtaccttcaaggacctatctgggcaaagattcctcacacggatggacactttcatccttctcctctgatgggaggctttggactgaaacatccgcctcctcaaatcatgatcaaaaatactccggtaccggcaaatcctccgacgactttcagcccggccaagtttgcttcatttatcactcagtactccactggacaggtcagcgtggaaattgagtgggagctacagaaagaaaacagcaaacgttggaatccagagattcagtacacttccaactacaacaagtctgttaatgtggactttactgtagacactaatggtgtttatagtgaacctcgccctattggaacccggtatctcacacgaaacttgtaatcctggttaatcaataaaccgtttaattcgtttcagttgaactttggctcttgtgcacttcttatcttatcttgtttccatggctactgcgtagataagcagcggcctgcggcgcttgcgcttcgcggtttacaactgctggttaatatttaactctcgccatacctctagtgatggagttggccactccctctatgcgcactcgctcgctcggtggggccggacgtgcaaagcacgtccgtctggcgacctttggtcgccaggccccaccgagcgagcgagtgcgcatagagggagtggccaa

SEQ ID NO: 5093 - DNA, 1800 bp, Adeno-associated virus 4
  modified_base (342)..(342): n is a, c, t or g
  misc_feature (342)..(342): n is a, c, g, or t
acggctcctggaaagaagagaccgttgattgaatccccccagcagcccgactcctccacgggtatcggcaaaaaaggcaagcagccggctaaaaagaagctcgttttcgaagacgaaactggagcaggcgacggaccccctgagggatcaacttccggagccatgtctgatgacagtgagatgcgtgcagcagctggcggagctgcagtcgagggsggacaaggtgccgatggagtgggtaatgcctcgggtgattggcattgcgattccacctggtctgagggccacgtcacgaccaccagcaccagaacctgggtcttgcccacctacaacaaccacctntacaagcgactcggagagagcctgcagtccaacacctacaacggattctccaccccctggggatactttgacttcaaccgcttccactgccacttctcaccacgtgactggcagcgactcatcaacaacaactggggcatgcgacccaaagccatgcgggtcaaaatcttcaacatccaggtcaaggaggtcacgacgtcgaacggcgagacaacggtggctaataaccttaccagcacggttcagatctttgcggactcgtcgtacgaactgccgtacgtgatggatgcgggtcaagagggcagcctgcctccttttcccaacgacgtctttatggtgccccagtacggctactgtggactggtgaccggcaacacttcgcagcaacagactgacagaaatgccttctactgcctggagtactttccttcgcagatgctgcggactggcaacaactttgaaattacgtacagttttgagaaggtgcctttccactcgatgtacgcgcacagccagagcctggaccggctgatgaaccctctcatcgaccagtacctgtggggactgcaatcgaccaccaccggaaccaccctgaatgccgggactgccaccaccaactttaccaagctgcggcctaccaacttttccaactttaaaaagaactggctgcccgggccttcaatcaagcagcagggcttctcaaagactgccaatcaaaactacaagatccctgccaccgggtcagacagtctcatcaaatacgagacgcacagcactctggacggaagatggagtgccctgacccccggacctccaatggccacggctggacctgcggacagcaagttcagcaacagccagctcatctttgcggggcctaaacagaacggcaacacggccaccgtacccgggactctgatcttcacctctgaggaggagctggcagccaccaacgccaccgatacggacatgtggggcaacctacctggcggtgaccagagcaacagcaacctgccgaccgtggacagactgacagccttgggagccgtgcctggaatggtctggcaaaacagagacatttactaccagggtcccatttgggccaagattcctcataccgatggacactttcacccctcaccgctgattggtgggtttgggctgaaacacccgcctcctcaaatttttatcaagaacaccccggtacctgcgaatcctgcaacgaccttcagctctactccggtaaactccttcattactcagtacagcactggccaggtgtcggtgcagattgactgggagatccagaaggagcggtccaaacgctggaaccccgaggtccagtttacctccaactacggacagcaaaactctctgttgtgggctcccgatgcggctgggaaatacactgagcctagggctatcggtacccgctacctcacccaccacctgtaataa

SEQ ID NO: 5094 - DNA, 2208 bp, Adeno-associated virus 4
  modified_base (750)..(750): n is a, c, t or g
  misc_feature (750)..(750): n is a, c, g, or t
atgactgacggttaccttccagattggctagaggacaacctctctgaaggcgttcgagagtggtgggcgctgcaacctggagcccctaaacccaaggcaaatcaacaacatcaggacaacgctcggggtcttgtgcttccgggttacaaatacctcggacccggcaacggactcgacaagggggaacccgtcaacgcagcggacgcggcagccctcgagcacgacaaggcctacgaccagcagctcaaggccggtgacaacccctacctcaagtacaaccacgccgacgcggagttccagcagcggcttcagggcgacacatcgtttgggggcaacctcggcagagcagtcttccaggccaaaaagagggttcttgaacctcttggtctggttgagcaagcgggtgagacggctcctggaaagaagagaccgttgattgaatccccccagcagcccgactcctccacgggtatcggcaaaaaaggcaagcagccggctaaaaagaagctcgttttcgaagacgaaactggagcaggcgacggaccccctgagggatcaacttccggagccatgtctgatgacagtgagatgcgtgcagcagctggcggagctgcagtcgagggsggacaaggtgccgatggagtgggtaatgcctcgggtgattggcattgcgattccacctggtctgagggccacgtcacgaccaccagcaccagaacctgggtcttgcccacctacaacaaccacctntacaagcgactcggagagagcctgcagtccaacacctacaacggattctccaccccctggggatactttgacttcaaccgcttccactgccacttctcaccacgtgactggcagcgactcatcaacaacaactggggcatgcgacccaaagccatgcgggtcaaaatcttcaacatccaggtcaaggaggtcacgacgtcgaacggcgagacaacggtggctaataaccttaccagcacggttcagatctttgcggactcgtcgtacgaactgccgtacgtgatggatgcgggtcaagagggcagcctgcctccttttcccaacgacgtctttatggtgccccagtacggctactgtggactggtgaccggcaacacttcgcagcaacagactgacagaaatgccttctactgcctggagtactttccttcgcagatgctgcggactggcaacaactttgaaattacgtacagttttgagaaggtgcctttccactcgatgtacgcgcacagccagagcctggaccggctgatgaaccctctcatcgaccagtacctgtggggactgcaatcgaccaccaccggaaccaccctgaatgccgggactgccaccaccaactttaccaagctgcggcctaccaacttttccaactttaaaaagaactggctgcccgggccttcaatcaagcagcagggcttctcaaagactgccaatcaaaactacaagatccctgccaccgggtcagacagtctcatcaaatacgagacgcacagcactctggacggaagatggagtgccctgacccccggacctccaatggccacggctggacctgcggacagcaagttcagcaacagccagctcatctttgcggggcctaaacagaacggcaacacggccaccgtacccgggactctgatcttcacctctgaggaggagctggcagccaccaacgccaccgatacggacatgtggggcaacctacctggcggtgaccagagcaacagcaacctgccgaccgtggacagactgacagccttgggagccgtgcctggaatggtctggcaaaacagagacatttactaccagggtcccatttgggccaagattcctcataccgatggacactttcacccctcaccgctgattggtgggtttgggctgaaacacccgcctcctcaaatttttatcaagaacaccccggtacctgcgaatcctgcaacgaccttcagctctactccggtaaactccttcattactcagtacagcactggccaggtgtcggtgcagattgactgggagatccagaaggagcggtccaaacgctggaaccccgaggtccagtttacctccaactacggacagcaaaactctctgttgtgggctcccgatgcggctgggaaatacactgagcctagggctatcggtacccgctacctcacccaccacctgtaataa

SEQ ID NO: 5095 - DNA, 1872 bp, Adeno-associated virus 4
atgccggggttctacgagatcgtgctgaaggtgcccagcgacctggacgagcacctgcccggcatttctgactcttttgtgagctgggtggccgagaaggaatgggagctgccgccggattctgacatggacttgaatctgattgagcaggcacccctgaccgtggccgaaaagctgcaacgcgagttcctggtcgagtggcgccgcgtgagtaaggccccggaggccctcttctttgtccagttcgagaagggggacagctacttccacctgcacatcctggtggagaccgtgggcgtcaaatccatggtggtgggccgctacgtgagccagattaaagagaagctggtgacccgcatctaccgcggggtcgagccgcagcttccgaactggttcgcggtgaccaagacgcgtaatggcgccggaggcgggaacaaggtggtggacgactgctacatccccaactacctgctccccaagacccagcccgagctccagtgggcgtggactaacatggaccagtatataagcgcctgtttgaatctcgcggagcgtaaacggctggtggcgcagcatctgacgcacgtgtcgcagacgcaggagcagaacaaggaaaaccagaaccccaattctgacgcgccggtcatcaggtcaaaaacctccgccaggtacatggagctggtcgggtggctggtggaccgcgggatcacgtcagaaaagcaatggatccaggaggaccaggcgtcctacatctccttcaacgccgcctccaactcgcggtcacaaatcaaggccgcgctggacaatgcctccaaaatcatgagcctgacaaagacggctccggactacctggtgggccagaacccgccggaggacatttccagcaaccgcatctaccgaatcctcgagatgaacgggtacgatccgcagtacgcggcctccgtcttcctgggctgggcgcaaaagaagttcgggaagaggaacaccatctggctctttgggccggccacgacgggtaaaaccaacatcgcggaagccatcgcccacgccgtgcccttctacggctgcgtgaactggaccaatgagaactttccgttcaacgattgcgtcgacaagatggtgatctggtgggaggagggcaagatgacggccaaggtcgtagagagcgccaaggccatcctgggcggaagcaaggtgcgcgtggaccaaaagtgcaagtcatcggcccagatcgacccaactcccgtgatcgtcacctccaacaccaacatgtgcgcggtcatcgacggaaactcgaccaccttcgagcaccaacaaccactccaggaccggatgttcaagttcgagctcaccaagcgcctggagcacgactttggcaaggtcaccaagcaggaagtcaaagactttttccggtgggcgtcagatcacgtgaccgaggtgactcacgagttttacgtcagaaagggtggagctagaaagaggcccgcccccaatgacgcagatataagtgagcccaagcgggcctgtccgtcagttgcgcagccatcgacgtcagacgcggaagctccggtggactacgcggacaggtaccaaaacaaatgttctcgtcacgtgggtatgaatctgatgctttttccctgccggcaatgcgagagaatgaatcagaatgtggacatttgcttcacgcacggggtcatggactgtgccgagtgcttccccgtgtcagaatctcaacccgtgtctgtcgtcagaaagcggacgtatcagaaactgtgtccgattcatcacatcatggggagggcgcccgaggtggcctgctcggcctgcgaactggccaatgtggacttggatgactgtgacatggaacaataa

SEQ ID NO: 5096 - DNA, 1611 bp, Adeno-associated virus 4
atgccggggttctacgagatcgtgctgaaggtgcccagcgacctggacgagcacctgcccggcatttctgactcttttgtgagctgggtggccgagaaggaatgggagctgccgccggattctgacatggacttgaatctgattgagcaggcacccctgaccgtggccgaaaagctgcaacgcgagttcctggtcgagtggcgccgcgtgagtaaggccccggaggccctcttctttgtccagttcgagaagggggacagctacttccacctgcacatcctggtggagaccgtgggcgtcaaatccatggtggtgggccgctacgtgagccagattaaagagaagctggtgacccgcatctaccgcggggtcgagccgcagcttccgaactggttcgcggtgaccaagacgcgtaatggcgccggaggcgggaacaaggtggtggacgactgctacatccccaactacctgctccccaagacccagcccgagctccagtgggcgtggactaacatggaccagtatataagcgcctgtttgaatctcgcggagcgtaaacggctggtggcgcagcatctgacgcacgtgtcgcagacgcaggagcagaacaaggaaaaccagaaccccaattctgacgcgccggtcatcaggtcaaaaacctccgccaggtacatggagctggtcgggtggctggtggaccgcgggatcacgtcagaaaagcaatggatccaggaggaccaggcgtcctacatctccttcaacgccgcctccaactcgcggtcacaaatcaaggccgcgctggacaatgcctccaaaatcatgagcctgacaaagacggctccggactacctggtgggccagaacccgccggaggacatttccagcaaccgcatctaccgaatcctcgagatgaacgggtacgatccgcagtacgcggcctccgtcttcctgggctgggcgcaaaagaagttcgggaagaggaacaccatctggctctttgggccggccacgacgggtaaaaccaacatcgcggaagccatcgcccacgccgtgcccttctacggctgcgtgaactggaccaatgagaactttccgttcaacgattgcgtcgacaagatggtgatctggtgggaggagggcaagatgacggccaaggtcgtagagagcgccaaggccatcctgggcggaagcaaggtgcgcgtggaccaaaagtgcaagtcatcggcccagatcgacccaactcccgtgatcgtcacctccaacaccaacatgtgcgcggtcatcgacggaaactcgaccaccttcgagcaccaacaaccactccaggaccggatgttcaagttcgagctcaccaagcgcctggagcacgactttggcaaggtcaccaagcaggaagtcaaagactttttccggtgggcgtcagatcacgtgaccgaggtgactcacgagttttacgtcagaaagggtggagctagaaagaggcccgcccccaatgacgcagatataagtgagcccaagcgggcctgtccgtcagttgcgcagccatcgacgtcagacgcggaagctccggtggactacgcggacagattggctagaggacaacctctctga

SEQ ID NO: 5097 - DNA, 1872 bp, Adeno-associated virus 4; identical to SEQ ID NO: 5095

SEQ ID NO: 5098 - DNA, 1617 bp, Adeno-associated virus 4
  modified_base (162)..(162): n is a, c, t, or g
  misc_feature (162)..(162): n is a, c, g, or t
atgcgtgcagcagctggcggagctgcagtcgagggsggacaaggtgccgatggagtgggtaatgcctcgggtgattggcattgcgattccacctggtctgagggccacgtcacgaccaccagcaccagaacctgggtcttgcccacctacaacaaccacctntacaagcgactcggagagagcctgcagtccaacacctacaacggattctccaccccctggggatactttgacttcaaccgcttccactgccacttctcaccacgtgactggcagcgactcatcaacaacaactggggcatgcgacccaaagccatgcgggtcaaaatcttcaacatccaggtcaaggaggtcacgacgtcgaacggcgagacaacggtggctaataaccttaccagcacggttcagatctttgcggactcgtcgtacgaactgccgtacgtgatggatgcgggtcaagagggcagcctgcctccttttcccaacgacgtctttatggtgccccagtacggctactgtggactggtgaccggcaacacttcgcagcaacagactgacagaaatgccttctactgcctggagtactttccttcgcagatgctgcggactggcaacaactttgaaattacgtacagttttgagaaggtgcctttccactcgatgtacgcgcacagccagagcctggaccggctgatgaaccctctcatcgaccagtacctgtggggactgcaatcgaccaccaccggaaccaccctgaatgccgggactgccaccaccaactttaccaagctgcggcctaccaacttttccaactttaaaaagaactggctgcccgggccttcaatcaagcagcagggcttctcaaagactgccaatcaaaactacaagatccctgccaccgggtcagacagtctcatcaaatacgagacgcacagcactctggacggaagatggagtgccctgacccccggacctccaatggccacggctggacctgcggacagcaagttcagcaacagccagctcatctttgcggggcctaaacagaacggcaacacggccaccgtacccgggactctgatcttcacctctgaggaggagctggcagccaccaacgccaccgatacggacatgtggggcaacctacctggcggtgaccagagcaacagcaacctgccgaccgtggacagactgacagccttgggagccgtgcctggaatggtctggcaaaacagagacatttactaccagggtcccatttgggccaagattcctcataccgatggacactttcacccctcaccgctgattggtgggtttgggctgaaacacccgcctcctcaaatttttatcaagaacaccccggtacctgcgaatcctgcaacgaccttcagctctactccggtaaactccttcattactcagtacagcactggccaggtgtcggtgcagattgactgggagatccagaaggagcggtccaaacgctggaaccccgaggtccagtttacctccaactacggacagcaaaactctctgttgtgggctcccgatgcggctgggaaatacactgagcctagggctatcggtacccgctacctcacccaccacctgtaa

SEQ ID NO: 5099 - DNA, 939 bp, Adeno-associated virus 4
atggagctggtcgggtggctggtggaccgcgggatcacgtcagaaaagcaatggatccaggaggaccaggcgtcctacatctccttcaacgccgcctccaactcgcggtcacaaatcaaggccgcgctggacaatgcctccaaaatcatgagcctgacaaagacggctccggactacctggtgggccagaacccgccggaggacatttccagcaaccgcatctaccgaatcctcgagatgaacgggtacgatccgcagtacgcggcctccgtcttcctgggctgggcgcaaaagaagttcgggaagaggaacaccatctggctctttgggccggccacgacgggtaaaaccaacatcgcggaagccatcgcccacgccgtgcccttctacggctgcgtgaactggaccaatgagaactttccgttcaacgattgcgtcgacaagatggtgatctggtgggaggagggcaagatgacggccaaggtcgtagagagcgccaaggccatcctgggcggaagcaaggtgcgcgtggaccaaaagtgcaagtcatcggcccagatcgacccaactcccgtgatcgtcacctccaacaccaacatgtgcgcggtcatcgacggaaactcgaccaccttcgagcaccaacaaccactccaggaccggatgttcaagttcgagctcaccaagcgcctggagcacgactttggcaaggtcaccaagcaggaagtcaaagactttttccggtgggcgtcagatcacgtgaccgaggtgactcacgagttttacgtcagaaagggtggagctagaaagaggcccgcccccaatgacgcagatataagtgagcccaagcgggcctgtccgtcagttgcgcagccatcgacgtcagacgcggaagctccggtggactacgcggacagattggctagaggacaacctctctga

SEQ ID NO: 5100 - DNA, 1197 bp, Adeno-associated virus 4
atggagctggtcgggtggctggtggaccgcgggatcacgtcagaaaagcaatggatccaggaggaccaggcgtcctacatctccttcaacgccgcctccaactcgcggtcacaaatcaaggccgcgctggacaatgcctccaaaatcatgagcctgacaaagacggctccggactacctggtgggccagaacccgccggaggacatttccagcaaccgcatctaccgaatcctcgagatgaacgggtacgatccgcagtacgcggcctccgtcttcctgggctgggcgcaaaagaagttcgggaagaggaacaccatctggctctttgggccggccacgacgggtaaaaccaacatcgcggaagccatcgcccacgccgtgcccttctacggctgcgtgaactggaccaatgagaactttccgttcaacgattgcgtcgacaagatggtgatctggtgggaggagggcaagatgacggccaaggtcgtagagagcgccaaggccatcctgggcggaagcaaggtgcgcgtggaccaaaagtgcaagtcatcggcccagatcgacccaactcccgtgatcgtcacctccaacaccaacatgtgcgcggtcatcgacggaaactcgaccaccttcgagcaccaacaaccactccaggaccggatgttcaagttcgagctcaccaagcgcctggagcacgactttggcaaggtcaccaagcaggaagtcaaagactttttccggtgggcgtcagatcacgtgaccgaggtgactcacgagttttacgtcagaaagggtggagctagaaagaggcccgcccccaatgacgcagatataagtgagcccaagcgggcctgtccgtcagttgcgcagccatcgacgtcagacgcggaagctccggtggactacgcggacaggtaccaaaacaaatgttctcgtcacgtgggtatgaatctgatgctttttccctgccggcaatgcgagagaatgaatcagaatgtggacatttgcttcacgcacggggtcatggactgtgccgagtgcttccccgtgtcagaatctcaacccgtgtctgtcgtcagaaagcggacgtatcagaaactgtgtccgattcatcacatcatggggagggcgcccgaggtggcctgctcggcctgcgaactggccaatgtggacttggatgactgtgacatggaacaa

SEQ ID NO: 5101 - DNA, 245 bp, Adeno-associated virus 4
ctccatcatctaggtttgcccactgacgtcaatgtgacgtcctagggttagggaggtccctgtattagcagtcacgtgagtgtcgtatttcgcggagcgtagcggagcgcataccaagctgccacgtcacagccacgtggtccgtttgcgacagtttgcgacaccatgtggtcaggagggtatataaccgcgagtgagccagcgaggagctccattttgcccgcgaattttgaacgagcagcagc

SEQ ID NO: 5102 - protein, 313 aa, Adeno-associated virus 4
  MOD_RES (313)..(313): Xaa = any amino acid
MELVGWLVDRGITSEKQWIQEDQASYISFNAASNSRSQIKAALDNASKIMSLTKTAPDYLVGQNPPEDISSNRIYRILEMNGYDPQYAASVFLGWAQKKFGKRNTIWLFGPATTGKTNIAEAIAHAVPFYGCVNWTNENFPFNDCVDKMVIWWEEGKMTAKVVESAKAILGGSKVRVDQKCKSSAQIDPTPVIVTSNTNMCAVIDGNSTTFEHQQPLQDRMFKFELTKRLEHDFGKVTKQEVKDFFRWASDHVTEVTHEFYVRKGGARKRPAPNDADISEPKRACPSVAQPSTSDAEAPVDYADRLARGQPLX

SEQ ID NO: 5103 - protein, 399 aa, Adeno-associated virus 4
MELVGWLVDRGITSEKQWIQEDQASYISFNAASNSRSQIKAALDNASKIMSLTKTAPDYLVGQNPPEDISSNRIYRILEMNGYDPQYAASVFLGWAQKKFGKRNTIWLFGPATTGKTNIAEAIAHAVPFYGCVNWTNENFPFNDCVDKMVIWWEEGKMTAKVVESAKAILGGSKVRVDQKCKSSAQIDPTPVIVTSNTNMCAVIDGNSTTFEHQQPLQDRMFKFELTKRLEHDFGKVTKQEVKDFFRWASDHVTEVTHEFYVRKGGARKRPAPNDADISEPKRACPSVAQPSTSDAEAPVDYADRYQNKCSRHVGMNLMLFPCRQCERMNQNVDICFTHGVMDCAECFPVSESQPVSVVRKRTYQKLCPIHHIMGRAPEVACSACELANVDLDDCDMEQ

SEQ ID NO: 5104 - protein, 623 aa, Adeno-associated virus 4
MPGFYEIVLKVPSDLDEHLPGISDSFVSWVAEKEWELPPDSDMDLNLIEQAPLTVAEKLQREFLVEWRRVSKAPEALFFVQFEKGDSYFHLHILVETVGVKSMVVGRYVSQIKEKLVTRIYRGVEPQLPNWFAVTKTRNGAGGGNKVVDDCYIPNYLLPKTQPELQWAWTNMDQYISACLNLAERKRLVAQHLTHVSQTQEQNKENQNPNSDAPVIRSKTSARYMELVGWLVDRGITSEKQWIQEDQASYISFNAASNSRSQIKAALDNASKIMSLTKTAPDYLVGQNPPEDISSNRIYRILEMNGYDPQYAASVFLGWAQKKFGKRNTIWLFGPATTGKTNIAEAIAHAVPFYGCVNWTNENFPFNDCVDKMVIWWEEGKMTAKVVESAKAILGGSKVRVDQKCKSSAQIDPTPVIVTSNTNMCAVIDGNSTTFEHQQPLQDRMFKFELTKRLEHDFGKVTKQEVKDFFRWASDHVTEVTHEFYVRKGGARKRPAPNDADISEPKRACPSVAQPSTSDAEAPVDYADRYQNKCSRHVGMNLMLFPCRQCERMNQNVDICFTHGVMDCAECFPVSESQPVSVVRKRTYQKLCPIHHIMGRAPEVACSACELANVDLDDCDMEQ

SEQ ID NO: 5105 - protein, 537 aa, Adeno-associated virus 4
  MOD_RES (537)..(537): Xaa = any amino acid
MPGFYEIVLKVPSDLDEHLPGISDSFVSWVAEKEWELPPDSDMDLNLIEQAPLTVAEKLQREFLVEWRRVSKAPEALFFVQFEKGDSYFHLHILVETVGVKSMVVGRYVSQIKEKLVTRIYRGVEPQLPNWFAVTKTRNGAGGGNKVVDDCYIPNYLLPKTQPELQWAWTNMDQYISACLNLAERKRLVAQHLTHVSQTQEQNKENQNPNSDAPVIRSKTSARYMELVGWLVDRGITSEKQWIQEDQASYISFNAASNSRSQIKAALDNASKIMSLTKTAPDYLVGQNPPEDISSNRIYRILEMNGYDPQYAASVFLGWAQKKFGKRNTIWLFGPATTGKTNIAEAIAHAVPFYGCVNWTNENFPFNDCVDKMVIWWEEGKMTAKVVESAKAILGGSKVRVDQKCKSSAQIDPTPVIVTSNTNMCAVIDGNSTTFEHQQPLQDRMFKFELTKRLEHDFGKVTKQEVKDFFRWASDHVTEVTHEFYVRKGGARKRPAPNDADISEPKRACPSVAQPSTSDAEAPVDYADRLARGQPLX

SEQ ID NO: 5106 - protein, 623 aa, Adeno-associated virus 4; identical to SEQ ID NO: 5104

SEQ ID NO: 5107 - protein, 544 aa, Adeno-associated virus 4
MSDDSEMRAAAGGAAVEGGQGADGVGNASGDWHCDSTWSEGHVTTTSTRTWVLPTYNNHLYKRLGESLQSNTYNGFSTPWGYFDFNRFHCHFSPRDWQRLINNNWGMRPKAMRVKIFNIQVKEVTTSNGETTVANNLTSTVQIFADSSYELPYVMDAGQEGSLPPFPNDVFMVPQYGYCGLVTGNTSQQQTDRNAFYCLEYFPSQMLRTGNNFEITYSFEKVPFHSMYAHSQSLDRLMNPLIDQYLWGLQSTTTGTTLNAGTATTNFTKLRPTNFSNFKKNWLPGPSIKQQGFSKTANQNYKIPATGSDSLIKYETHSTLDGRWSALTPGPPMATAGPADSKFSNSQLIFAGPKQNGNTATVPGTLIFTSEEELAATNATDTDMWGNLPGGDQSNSNLPTVDRLTALGAVPGMVWQNRDIYYQGPIWAKIPHTDGHFHPSPLIGGFGLKHPPPQIFIKNTPVPANPATTFSSTPVNSFITQYSTGQVSVQIDWEIQKERSKRWNPEVQFTSNYGQQNSLLWAPDAAGKYTEPRAIGTRYLTHHL

SEQ ID NO: 5108 - protein, 734 aa, Adeno-associated virus 4; identical to SEQ ID NO: 4754

SEQ ID NO: 5109 - protein, 598 aa, Adeno-associated virus 4
TAPGKKRPLIESPQQPDSSTGIGKKGKQPAKKKLVFEDETGAGDGPPEGSTSGAMSDDSEMRAAAGGAAVEGGQGADGVGNASGDWHCDSTWSEGHVTTTSTRTWVLPTYNNHLYKRLGESLQSNTYNGFSTPWGYFDFNRFHCHFSPRDWQRLINNNWGMRPKAMRVKIFNIQVKEVTTSNGETTVANNLTSTVQIFADSSYELPYVMDAGQEGSLPPFPNDVFMVPQYGYCGLVTGNTSQQQTDRNAFYCLEYFPSQMLRTGNNFEITYSFEKVPFHSMYAHSQSLDRLMNPLIDQYLWGLQSTTTGTTLNAGTATTNFTKLRPTNFSNFKKNWLPGPSIKQQGFSKTANQNYKIPATGSDSLIKYETHSTLDGRWSALTPGPPMATAGPADSKFSNSQLIFAGPKQNGNTATVPGTLIFTSEEELAATNATDTDMWGNLPGGDQSNSNLPTVDRLTALGAVPGMVWQNRDIYYQGPIWAKIPHTDGHFHPSPLIGGFGLKHPPPQIFIKNTPVPANPATTFSSTPVNSFITQYSTGQVSVQIDWEIQKERSKRWNPEVQFTSNYGQQNSLLWAPDAAGKYTEPRAIGTRYLTHHL

SEQ ID NO: 5110 - DNA, 129 bp, Adeno-associated virus 4
ttggccactccctctatgcgcgctcgctcactcactcggccctgcggccagaggccggcagtctggagacctttggtgtccagggcagggccgagtgagtgagcgagcgcgcatagagggagtggccaa

SEQ ID NO: 5111 - DNA, 125 bp, Adeno-associated virus 4
ttggccactccctctatgcgcgctcgctcactcactcggccctggagaccaaaggtctccagactgccggcctctggccggcagggccgagtgagtgagcgagcgcgcatagagggagtggccaa

SEQ ID NO: 5112 - DNA, 4768 bp, Adeno-associated virus 4
  modified_base (3009)..(3009): n is a, c, t or g
  misc_feature (3009)..(3009): n is a, c, g, or t
ttggccactccctctatgcgcgctcgctcactcactcggccctggagaccaaaggtctccagactgccggcctctggccggcagggccgagtgagtgagcgagcgcgcatagagggagtggccaactccatcatctaggtttgcccactgacgtcaatgtgacgtcctagggttagggaggtccctgtattagcagtcacgtgagtgtcgtatttcgcggagcgtagcggagcgcataccaagctgccacgtcacagccacgtggtccgtttgcgacagtttgcgacaccatgtggtcaggagggtatataaccgcgagtgagccagcgaggagctccattttgcccgcgaattttgaacgagcagcagccatgccggggttctacgagatcgtgctgaaggtgcccagcgacctggacgagcacctgcccggcatttctgactcttttgtgagctgggtggccgagaaggaatgggagctgccgccggattctgacatggacttgaatctgattgagcaggcacccctgaccgtggccgaaaagctgcaacgcgagttcctggtcgagtggcgccgcgtgagtaaggccccggaggccctcttctttgtccagttcgagaagggggacagctacttccacctgcacatcctggtggagaccgtgggcgtcaaatccatggtggtgggccgctacgtgagccagattaaagagaagctggtgacccgcatctaccgcggggtcgagccgcagcttccgaactggttcgcggtgaccaagacgcgtaatggcgccggaggcgggaacaaggtggtggacgactgctacatccccaactacctgctccccaagacccagcccgagctccagtgggcgtggactaacatggaccagtatataagcgcctgtttgaatctcgcggagcgtaaacggctggtggcgcagcatctgacgcacgtgtcgcagacgcaggagcagaacaaggaaaaccagaaccccaattctgacgcgccggtcatcaggtcaaaaacctccgccaggtacatggagctggtcgggtggctggtggaccgcgggatcacgtcagaaaagcaatggatccaggaggaccaggcgtcctacatctccttcaacgccgcctccaactcgcggtcacaaatcaaggccgcgctggacaatgcctccaaaatcatgagcctgacaaagacggctccggactacctggtgggccagaacccgccggaggacatttccagcaaccgcatctaccgaatcctcgagatgaacgggtacgatccgcagtacgcggcctccgtcttcctgggctgggcgcaaaagaagttcgggaagaggaacaccatctggctctttgggccggccacgacgggtaaaaccaacatcgcggaagccatcgcccacgccgtgcccttctacggctgcgtgaactggaccaatgagaactttccgttcaacgattgcgtcgacaagatggtgatctggtgggaggagggcaagatgacggccaaggtcgtagagagcgccaaggccatcctgggcggaagcaaggtgcgcgtggaccaaaagtgcaagtcatcggcccagatcgacccaactcccgtgatcgtcacctccaacaccaacatgtgcgcggtcatcgacggaaactcgaccaccttcgagcaccaacaaccactccaggaccggatgttcaagttcgagctcaccaagcgcctggagcacgactttggcaaggtcaccaagcaggaagtcaaagactttttccggtgggcgtcagatcacgtgaccgaggtgactcacgagttttacgtcagaaagggtggagctagaaagaggcccgcccccaatgacgcagatataagtgagcccaagcgggcctgtccgtcagttgcgcagccatcgacgtcagacgcggaagctccggtggactacgcggacaggtaccaaaacaaatgttctcgtcacgtgggtatgaatctgatgctttttccctgccggcaatgcgagagaatgaatcagaatgtggacatttgcttcacgcacggggtcatggactgtgccgagtgcttccccgtgtcagaatctcaacccgtgtctgtcgtcagaaagcggacgtatcagaaactgtgtccgattcatcacatcatggggagggcgcccgaggtggcctgctcggcctgcgaactggccaatgtggacttggatgactgtgacatggaacaataaatgactcaaaccagatatgactgacggttaccttccagattggctagaggacaacctctctgaaggcgttcgagagtggtgggcgctgcaacctggagcccctaaacccaaggcaaatcaacaacatcaggacaacgctcggggtcttgtgcttccgggttacaaatacctcggacccggcaacggactcgacaagggggaacccgtcaacgcagcggacgcggcagccctcgagcacgacaaggcctacgaccagcagctcaaggccggtgacaacccctacctcaagtacaaccacgccgacgcggagttccagcagcggcttcagggcgacacaccgtttgggggcaacctcggcagagcagtcttccaggccaaaaagagggttcttgaacctcttggtctggttgagcaagcgggtgagacggctcctggaaagaagagaccgttgattgaatccccccagcagcccgactcctccacgggtatcggcaaaaaaggcaagcagccggctaaaaagaagctcgttttcgaagacgaaactggagcaggcgacggaccccctgagggatcaacttccggagccatgtctgatgacagtgagatgcgtgcagcagctggcggagctgcagtcgagggsggacaaggtgccgatggagtgggtaatgcctcgggtgattggcattgcgattccacctggtctgagggccacgtcacgaccaccagcaccagaacctgggtcttgcccacctacaacaaccacctntacaagcgactcggagagagcctgcagtccaacacctacaacggattctccaccccctggggatactttgacttcaaccgcttccactgccacttctcaccacgtgactggcagcgactcatcaacaacaactggggcatgcgacccaaagccatgcgggtcaaaatcttcaacatccaggtcaaggaggtcacgacgtcgaacggcgagacaacggtggctaataaccttaccagcacggttcagatctttgcggactcgtcgtacgaactgccgtacgtgatggatgcgggtcaagagggcagcctgcctccttttcccaacgacgtctttatggtgccccagtacggctactgtggactggtgaccggcaacacttcgcagcaacagactgacagaaatgccttctactgcctggagtactttccttcgcagatgctgcggactggcaacaactttgaaattacgtacagttttgagaaggtgcctttccactcgatgtacgcgcacagccagagcctggaccggctgatgaaccctctcatcgaccagtacctgtggggactgcaatcgaccaccaccggaaccaccctgaatgccgggactgccaccaccaactttaccaagctgcggcctaccaacttttccaactttaaaaagaactggctgcccgggccttcaatcaagcagcagggcttctcaaagactgccaatcaaaactacaagatccctgccaccgggtcagacagtctcatcaaatacgagacgcacagcactctggacggaagatggagtgccctgacccccggacctccaatggccacggctggacctgcggacagcaagttcagcaacagccagctcatctttgcggggcctaaacagaacggcaacacggccaccgtacccgggactctgatcttcacctctgaggaggagctggcagccaccaacgccaccgatacggacatgtggggcaacctacctggcggtgaccagagcaacagcaacctgccgaccgtggacagactgacagccttgggagccgtgcctggaatggtctggcaaaacagagacatttactaccagggtcccatttgggccaagattcctcataccgatggacactttcacccctcaccgctgattggtgggtttgggctgaaacacccgcctcctcaaatttttatcaagaacaccccggtacctgcgaatcctgcaacgaccttcagctctactccggtaaactccttcattactcagtacagcactggccaggtgtcggtgcagattgactgggagatccagaaggagcggtccaaacgctggaaccccgaggtccagtttacctccaactacggacagcaaaactctctgttgtgggctcccgatgcggctgggaaatacactgagcctagggctatcggtacccgctacctcacccaccacctgtaataacctgttaatcaataaaccggtttattcgtttcagttgaactttggtctccgtgtccttcttatcttatctcgtttccatggctactgcgtacataagcagcggcctgcggcgcttgcgcttcgcggtttacaactgccggttaatcagtaacttctggcaaaccatgatgatggagttggccactccctctatgcgcgctcgctcactcactcggccctggagaccaaaggtctccagactgccggcctctggccggcagggccgagtgagtgagcgagcgcgcatagagggagtggccaa

SEQ ID NO: 5113 - protein, 725 aa, Adeno-associated virus 5
MAADGYLPDWLEDTLSEGIRQWWKLKPGPPPPKPAERHKDDSRGLVLPGYKYLGPFNGLDKGEPVNEADAAALEHDKAYDRQLDSGDNPYLKYNHADAEFQERLKEDTSFGGNLGRAVFQAKKRVLEPFGLVEEGAKTAPTGKRIDDHFPKRKKARTEEDSKPSTSSDAEAGPSGSQQLQIPAQPASSLGADTMSAGGGGPLGDNNQGADGVGNASGDWHCDSTWMGDRVVTKSTRTWVLPSYNNHQYREIKSGSVDGSNANAYFGYSTPWGYFDFNRFHSHWSPRDWQRLINNYWGFRPRSLRVKIFNIQVKEVTVQDSTTTIANNLTSTVQVFTDDDYQLPYVVGNGTEGCLPAFPPQVFTLPQYGYATLNRDNTENPTERSSFFCLEYFPSKMLRTGNNFEFTYNFEEVPFHSSFAPSQNLFKLANPLVDQYLYRFVSTNNTGGVQFNKNLAGRYANTYKNWFPGPMGRTQGWNLGSGVNRASVSAFATTNRMELEGASYQVPPQPNGMTNNLQGSNTYALENTMIFNSQPANPGTTATYLEGNMLITSESETQPVNRVAYNVGGQMATNNQSSTTAPTTGTYNLQEIVPGSVWMERDVYLQGPIWAKIPETGAHFHPSPAMGGFGLKHPPPMMLIKNTPVPGNITSFSDVPVSSFITQYSTGQVTVEMEWELKKENSKRWNPEIQYTNNYNDPQFVDFAPDSTGEYRTTRPIGTRYLTRPL

SEQ ID NO: 5114 - protein, 724 aa, Adeno-associated virus 5
MSFVDHPPDWLEEVGEGLREFLGLEAGPPKPKPNQQHQDQARGLVLPGYNYLGPGNGLDRGEPVNRADEVAREHDISYNEQLEAGDNPYLKYNHADAEFQEKLADDTSFGGNLGKAVFQAKKRVLEPFGLVEEGAKTAPTGKRIDDHFPKRKKARTEEDSKPSTSSDAEAGPSGSQQLQIPAQPASSLGADTMSAGGGGPLGDNNQGADGVGNASGDWHCDSTWMGDRVVTKSTRTWVLPSYNNHQYREIKSGSVDGSNANAYFGYSTPWGYFDFNRFHSHWSPRDWQRLINNYWGFRPRSLRVKIFNIQVKEVTVQDSTTTIANNLTSTVQVFTDDDYQLPYVVGNGTEGCLPAFPPQVFTLPQYGYATLNRDNTENPTERSSFFCLEYFPSKMLRTGNNFEFTYNFEEVPFHSSFAPSQNLFKLANPLVDQYLYRFVSTNNTGGVQFNKNLAGRYANTYKNWFPGPMGRTQGWNLGSGVNRASVSAFATTNRMELEGASYQVPPQPNGMTNNLQGSNTYALENTMIFNSQPANPGTTATYLEGNMLITSESETQPVNRVAYNVGGQMATNNQSSTTAPATGTYNLQEIVPGSVWMERDVYLQGPIWAKIPETGAHFHPSPAMGGFGLKHPPPMMLIKNTPVPGNITSFSDVPVSSFITQYSTGQVTVEMEWELKKENSKRWNPEIQYTNNYNDPQFVDFAPDSTGEYRTTRPIGTRYLTRPL

SEQ ID NO: 5115 - protein, 2175 aa, Adeno-associated virus 5
ATGTCTTTTGTTGATCACCCTCCAGATTGGTTGGAAGAAGTTGGTGAAGGTCTTCGCGAGTTTTTGGGCCTTGAAGCGGGCCCACCGAAACCAAAACCCAATCAGCAGCATCAAGATCAAGCCCGTGGTCTTGTGCTGCCTGGTTATAACTATCTCGGACCCGGAAACGGTCTCGATCGAGGAGAGCCTGTCAACAGGGCAGACGAGGTCGCGCGAGAGCACGACATCTCGTACAACGAGCAGCTTGAGGCGGGAGACAACCCCTACCTCAAGTACAACCACGCGGACGCCGAGTTTCAGGAGAAGCTCGCCGACGACACATCCTTCGGGGGAAACCTCGGAAAGGCAGTCTTTCAGGCCAAGAAAAGGGTTCTCGAACCTTTTGGCCTGGTTGAAGAGGGTGCTAAGACGGCCCCTACCGGAAAGCGGATAGACGACCACTTTCCAAAAAGAAAGAAGGCTCGGACCGAAGAGGACTCCAAGCCTTCCACCTCGTCAGACGCCGAAGCTGGACCCAGCGGATCCCAGCAGCTGCAAATCCCAGCCCAACCAGCCTCAAGTTTGGGAGCTGATACAATGTCTGCGGGAGGTGGCGGCCCATTGGGCGACAATAACCAAGGTGCCGATGGAGTGGGCAATGCCTCGGGAGATTGGCATTGCGATTCCACGTGGATGGGGGACAGAGTCGTCACCAAGTCCACCCGAACCTGGGTGCTGCCCAGCTACAACAACCACCAGTACCGAGAGATCAAAAGCGGCTCCGTCGACGGAAGCAACGCCAACGCCTACTTTGGATACAGCACCCCCTGGGGGTACTTTGACTTTAACCGCTTCCACAGCCACTGGAGCCCCCGAGACTGGCAAAGACTCATCAACAACTACTGGGGCTTCAGACCCCGGTCCCTCAGAGTCAAAATCTTCAACATTCAAGTCAAAGAGGTCACGGTGCAGGACTCCACCACCACCATCGCCAACAACCTCACCTCCACCGTCCAAGTGTTTACGGACGACGACTACCAGCTGCCCTACGTCGTCGGCAACGGGACCGAGGGATGCCTGCCGGCCTTCCCTCCGCAGGTCTTTACGCTGCCGCAGTACGGTTACGCGACGCTGAACCGCGACAACACAGAAAATCCCACCGAGAGGAGCAGCTTCTTCTGCCTAGAGTACTTTCCCAGCAAGATGCTGAGAACGGGCAACAACTTTGAGTTTACCTACAACTTTGAGGAGGTGCCCTTCCACTCCAGCTTCGCTCCCAGTCAGAACCTGTTCAAGCTGGCCAACCCGCTGGTGGACCAGTACTTGTACCGCTTCGTGAGCACAAATAACACTGGCGGAGTCCAGTTCAACAAGAACCTGGCCGGGAGATACGCCAACACCTACAAAAACTGGTTCCCGGGGCCCATGGGCCGAACCCAGGGCTGGAACCTGGGCTCCGGGGTCAACCGCGCCAGTGTCAGCGCCTTCGCCACGACCAATAGGATGGAGCTCGAGGGCGCGAGTTACCAGGTGCCCCCGCAGCCGAACGGCATGACCAACAACCTCCAGGGCAGCAACACCTATGCCCTGGAGAACACTATGATCTTCAACAGCCAGCCGGCGAACCCGGGCACCACCGCCACGTACCTCGAGGGCAACATGCTCATCACCAGCGAGAGCGAGACGCAGCCGGTGAACCGCGTGGCGTACAACGTCGGCGGGCAGATGGCCACCAACAACCAGAGCTCCACCACTGCCCCCGCGACCGGCACGTACAACCTCCAGGAAATCGTGCCCGGCAGCGTGTGGATGGAGAGGGACGTGTACCTCCAAGGACCCATCTGGGCCAAGATCCCAGAGACGGGGGCGCACTTTCACCCCTCTCCGGCCATGGGCGGATTCGGACTCAAACACCCACCGCCCATGATGCTCATCAAGAACACGCCTGTGCCCGGAAATATCACCAGCTTCTCGGACGTGCCCGTCAGCAGCTTCATCACCCAGTACAGCACCGGGCAGGTCACCGTGGAGATGGAGTGGGAGCTCAAGAAGGAAAACTCCAAGAGGTGGAACCCAGAGATCCAGTACACAAACAACTACAACGACCCCCAGTTTGTGGACTTTGCCCCGGACAGCACCGGGGAATACAGAACCACCAGACCTATCGGAACCCGATACCTTACCCGACCCCTTTAA

SEQ ID NO: 5116 - DNA, 2208 bp, Adeno-associated virus 6
atggctgccgatggttatcttccagattggctcgaggacaacctctctgagggcattcgcgagtggtgggacttgaaacctggagccccgaaacccaaagccaaccagcaaaagcaggacgacggccggggtctggtgcttcctggctacaagtacctcggacccttcaacggactcgacaagggggagcccgtcaacgcggcggatgcagcggccctcgagcacgacaaggcctacgaccagcagctcaaagcgggtgacaatccgtacctgcggtataaccacgccgacgccgagtttcaggagcgtctgcaagaagatacgtcttttgggggcaacctcgggcgagcagtcttccaggccaagaagagggttctcgaaccttttggtctggttgaggaaggtgctaagacggctcctggaaagaaacgtccggtagagcagtcgccacaagagccagactcctcctcgggcattggcaagacaggccagcagcccgctaaaaagagactcaattttggtcagactggcgactcagagtcagtccccgacccacaacctctcggagaacctccagcaacccccgctgctgtgggacctactacaatggcttcaggcggtggcgcaccaatggcagacaataacgaaggcgccgacggagtgggtaatgcctcaggaaattggcattgcgattccacatggctgggcgacagagtcatcaccaccagcacccgaacatgggccttgcccacctataacaaccacctctacaagcaaatctccagtgcttcaacgggggccagcaacgacaaccactacttcggctacagcaccccctgggggtattttgatttcaacagattccactgccatttctcaccacgtgactggcagcgactcatcaacaacaattggggattccggcccaagagactcaacttcaagctcttcaacatccaagtcaaggaggtcacgacgaatgatggcgtcacgaccatcgctaataaccttaccagcacggttcaagtcttctcggactcggagtaccagttgccgtacgtcctcggctctgcgcaccagggctgcctccctccgttcccggcggacgtgttcatgattccgcagtacggctacctaacgctcaacaatggcagccaggcagtgggacggtcatccttttactgcctggaatatttcccatcgcagatgctgagaacgggcaataactttaccttcagctacaccttcgaggacgtgcctttccacagcagctacgcgcacagccagagcctggaccggctgatgaatcctctcatcgaccagtacctgtattacctgaacagaactcagaatcagtccggaagtgcccaaaacaaggacttgctgtttagccgggggtctccagctggcatgtctgttcagcccaaaaactggctacctggaccctgttaccggcagcagcgcgtttctaaaacaaaaacagacaacaacaacagcaactttacctggactggtgcttcaaaatataaccttaatgggcgtgaatctataatcaaccctggcactgctatggcctcacacaaagacgacaaagacaagttctttcccatgagcggtgtcatgatttttggaaaggagagcgccggagcttcaaacactgcattggacaatgtcatgatcacagacgaagaggaaatcaaagccactaaccccgtggccaccgaaagatttgggactgtggcagtcaatctccagagcagcagcacagaccctgcgaccggagatgtgcatgttatgggagccttacctggaatggtgtggcaagacagagacgtatacctgcagggtcctatttgggccaaaattcctcacacggatggacactttcacccgtctcctctcatgggcggctttggacttaagcacccgcctcctcagatcctcatcaaaaacacgcctgttcctgcgaatcctccggcagagttttcggctacaaagtttgcttcattcatcacccagtattccacaggacaagtgagcgtggagattgaatgggagctgcagaaagaaaacagcaaacgctggaatcccgaagtgcagtatacatctaactatgcaaaatctgccaacgttgatttcactgtggacaacaatggactttatactgagcctcgccccattggcacccgttacctcacccgtcccctg

SEQ ID NO: 5117 - protein, 736 aa, Adeno-associated virus 6; identical to SEQ ID NO: 4762

SEQ ID NO: 5118 - protein, 623 aa, Adeno-associated virus 6
MPGFYEIVIKVPSDLDEHLPGISDSFVNWVAEKEWELPPDSDMDLNLIEQAPLTVAEKLQRDFLVQWRRVSKAPEALFFVQFEKGESYFHLHILVETTGVKSMVLGRFLSQIRDKLVQTIYRGIEPTLPNWFAVTKTRNGAGGGNKVVDECYIPNYLLPKTQPELQWAWTNMEEYISACLNLAERKRLVAHDLTHVSQTQEQNKENLNPNSDAPVIRSKTSARYMELVGWLVDRGITSEKQWIQEDQASYISFNAASNSRSQIKAALDNAGKIMALTKSAPDYLVGPAPPADIKTNRIYRILELNGYDPAYAGSVFLGWAQKRFGKRNTIWLFGPATTGKTNIAEAIAHAVPFYGCVNWTNENFPFNDCVDKMVIWWEEGKMTAKVVESAKAILGGSKVRVDQKCKSSAQIDPTPVIVTSNTNMCAVIDGNSTTFEHQQPLQDRMFKFELTRRLEHDFGKVTKQEVKEFFRWAQDHVTEVAHEFYVRKGGANKRPAPDDADKSEPKRACPSVADPSTSDAEGAPVDFADRYQNKCSRHAGMLQMLFPCKTCERMNQNFNICFTHGTRDCSECFPGVSESQPVVRKRTYRKLCAIHHLLGRAPEIACSACDLVNVDLDDCVSEQ

SEQ ID NO: 5119 - DNA, 4683 bp, Adeno-associated virus 6
ttggccactccctctctgcgcgctcgctcgctcactgaggccgggcgaccaaaggtcgcccgacgcccgggctttgcccgggcggcctcagtgagcgagcgagcgcgcagagagggagtggccaactccatcactaggggttcctggaggggtggagtcgtgacgtgaattacgtcatagggttagggaggtcctgtattagaggtcacgtgagtgttttgcgacattttgcgacaccatgtggtcacgctgggtatttaagcccgagtgagcacgcagggtctccattttgaagcgggaggtttgaacgcgcagcgccatgccggggttttacgagattgtgattaaggtccccagcgaccttgacgagcatctgcccggcatttctgacagctttgtgaactgggtggccgagaaggaatgggagttgccgccagattctgacatggatctgaatctgattgagcaggcacccctgaccgtggccgagaagctgcagcgcgacttcctggtccagtggcgccgcgtgagtaaggccccggaggccctcttctttgttcagttcgagaagggcgagtcctacttccacctccatattctggtggagaccacgggggtcaaatccatggtgctgggccgcttcctgagtcagattagggacaagctggtgcagaccatctaccgcgggatcgagccgaccctgcccaactggttcgcggtgaccaagacgcgtaatggcgccggaggggggaacaaggtggtggacgagtgctacatccccaactacctcctgcccaagactcagcccgagctgcagtgggcgtggactaacatggaggagtatataagcgcgtgtttaaacctggccgagcgcaaacggctcgtggcgcacgacctgacccacgtcagccagacccaggagcagaacaaggagaatctgaaccccaattctgacgcgcctgtcatccggtcaaaaacctccgcacgctacatggagctggtcgggtggctggtggaccggggcatcacctccgagaagcagtggatccaggaggaccaggcctcgtacatctccttcaacgccgcctccaactcgcggtcccagatcaaggccgctctggacaatgccggcaagatcatggcgctgaccaaatccgcgcccgactacctggtaggccccgctccgcccgccgacattaaaaccaaccgcatttaccgcatcctggagctgaacggctacgaccctgcctacgccggctccgtctttctcggctgggcccagaaaaggttcggaaaacgcaacaccatctggctgtttgggccggccaccacgggcaagaccaacatcgcggaagccatcgcccacgccgtgcccttctacggctgcgtcaactggaccaatgagaactttcccttcaacgattgcgtcgacaagatggtgatctggtgggaggagggcaagatgacggccaaggtcgtggagtccgccaaggccattctcggcggcagcaaggtgcgcgtggaccaaaagtgcaagtcgtccgcccagatcgatcccacccccgtgatcgtcacctccaacaccaacatgtgcgccgtgattgacgggaacagcaccaccttcgagcaccagcagccgttgcaggaccggatgttcaaatttgaactcacccgccgtctggagcatgactttggcaaggtgacaaagcaggaagtcaaagagttcttccgctgggcgcaggatcacgtgaccgaggtggcgcatgagttctacgtcagaaagggtggagccaacaagagacccgcccccgatgacgcggataaaagcgagcccaagcgggcctgcccctcagtcgcggatccatcgacgtcagacgcggaaggagctccggtggactttgccgacaggtaccaaaacaaatgttctcgtcacgcgggcatgcttcagatgctgtttccctgcaaaacatgcgagagaatgaatcagaatttcaacatttgcttcacgcacgggaccagagactgttcagaatgtttccccggcgtgtcagaatctcaaccggtcgtcagaaagaggacgtatcggaaactctgtgccattcatcatctgctggggcgggctcccgagattgcttgctcggcctgcgatctggtcaacgtggatctggatgactgtgtttctgagcaataaatgacttaaaccaggtatggctgccgatggttatcttccagattggctcgaggacaacctctctgagggcattcgcgagtggtgggacttgaaacctggagccccgaaacccaaagccaaccagcaaaagcaggacgacggccggggtctggtgcttcctggctacaagtacctcggacccttcaacggactcgacaagggggagcccgtcaacgcggcggatgcagcggccctcgagcacgacaaggcctacgaccagcagctcaaagcgggtgacaatccgtacctgcggtataaccacgccgacgccgagtttcaggagcgtctgcaagaagatacgtcttttgggggcaacctcgggcgagcagtcttccaggccaagaagagggttctcgaaccttttggtctggttgaggaaggtgctaagacggctcctggaaagaaacgtccggtagagcagtcgccacaagagccagactcctcctcgggcattggcaagacaggccagcagcccgctaaaaagagactcaattttggtcagactggcgactcagagtcagtccccgacccacaacctctcggagaacctccagcaacccccgctgctgtgggacctactacaatggcttcaggcggtggcgcaccaatggcagacaataacgaaggcgccgacggagtgggtaatgcctcaggaaattggcattgcgattccacatggctgggcgacagagtcatcaccaccagcacccgaacatgggccttgcccacctataacaaccacctctacaagcaaatctccagtgcttcaacgggggccagcaacgacaaccactacttcggctacagcaccccctgggggtattttgatttcaacagattccactgccatttctcaccacgtgactggcagcgactcatcaacaacaattggggattccggcccaagagactcaacttcaagctcttcaacatccaagtcaaggaggtcacgacgaatgatggcgtcacgaccatcgctaataaccttaccagcacggttcaagtcttctcggactcggagtaccagttgccgtacgtcctcggctctgcgcaccagggctgcctccctccgttcccggcggacgtgttcatgattccgcagtacggctacctaacgctcaacaatggcagccaggcagtgggacggtcatccttttactgcctggaatatttcccatcgcagatgctgagaacgggcaataactttaccttcagctacaccttcgaggacgtgcctttccacagcagctacgcgcacagccagagcctggaccggctgatgaatcctctcatcgaccagtacctgtattacctgaacagaactcagaatcagtccggaagtgcccaaaacaaggacttgctgtttagccgggggtctccagctggcatgtctgttcagcccaaaaactggctacctggaccctgttaccggcagcagcgcgtttctaaaacaaaaacagacaacaacaacagcaactttacctggactggtgcttcaaaatataaccttaatgggcgtgaatctataatcaaccctggcactgctatggcctcacacaaagacgacaaagacaagttctttcccatgagcggtgtcatgatttttggaaaggagagcgccggagcttcaaacactgcattggacaatgtcatgatcacagacgaagaggaaatcaaagccactaaccccgtggccaccgaaagatttgggactgtggcagtcaatctccagagcagcagcacagaccctgcgaccggagatgtgcatgttatgggagccttacctggaatggtgtggcaagacagagacgtatacctgcagggtcctatttgggccaaaattcctcacacggatggacactttcacccgtctcctctcatgggcggctttggacttaagcacccgcctcctcagatcctcatcaaaaacacgcctgttcctgcgaatcctccggcagagttttcggctacaaagtttgcttcattcatcacccagtattccacaggacaagtgagcgtggagattgaatgggagctgcagaaagaaaacagcaaacgctggaatcccgaagtgcagtatacatctaactatgcaaaatctgccaacgttgatttcactgtggacaacaatggactttatactgagcctcgccccattggcacccgttacctcacccgtcccctgtaattgtgtgttaatcaataaaccggttaattcgtgtcagttgaactttggtctcatgtcgttattatcttatctggtcaccatagcaaccggttacacattaactgcttagttgcgcttcgcgaatacccctagtgatggagttgcccactccctctatgcgcgctcgctcgctcggtggggccggcagagcagagctctgccgtctgcggacctttggtccgcaggccccaccgagcgagcgagcgcgcatagagggagtgggcaa

SEQ ID NO: 5120 - DNA, 2211 bp, Adeno-associated virus 6
atggctgccgatggttatcttccagattggctcgaggacaacctctctgagggcattcgcgagtggtgggacttgaaacctggagccccgaaacccaaagccaaccagcaaaagcaggacgacggccggggtctggtgcttcctggctacaagtacctcggacccttcaacggactcgacaagggggagcccgtcaacgcggcggatgcagcggccctcgagcacgacaaggcctacgaccagcagctcaaagcgggtgacaatccgtacctgcggtataaccacgccgacgccgagtttcaggagcgtctgcaagaagatacgtcttttgggggcaacctcgggcgagcagtcttccaggccaagaagagggttctcgaaccttttggtctggttgaggaaggtgctaagacggctcctggaaagaaacgtccggtagagcagtcgccacaagagccagactcctcctcgggcattggcaagacaggccagcagcccgctaaaaagagactcaattttggtcagactggcgactcagagtcagtccccgacccacaacctctcggagaacctccagcaacccccgctgctgtgggacctactacaatggcttcaggcggtggcgcaccaatggcagacaataacgaaggcgccgacggagtgggtaatgcctcaggaaattggcattgcgattccacatggctgggcgacagagtcatcaccaccagcacccgaacatgggccttgcccacctataacaaccacctctacaagcaaatctccagtgcttcaacgggggccagcaacgacaaccactacttcggctacagcaccccctgggggtattttgatttcaacagattccactgccatttctcaccacgtgactggcagcgactcatcaacaacaattggggattccggcccaagagactcaacttcaagctcttcaacatccaagtcaaggaggtcacgacgaatgatggcgtcacgaccatcgctaataaccttaccagcacggttcaagtcttctcggactcggagtaccagttgccgtacgtcctcggctctgcgcaccagggctgcctccctccgttcccggcggacgtgttcatgattccgcagtacggctacctaacgctcaacaatggcagccaggcagtgggacggtcatccttttactgcctggaatatttcccatcgcagatgctgagaacgggcaataactttaccttcagctacaccttcgaggacgtgcctttccacagcagctacgcgcacagccagagcctggaccggctgatgaatcctctcatcgaccagtacctgtattacctgaacagaactcagaatcagtccggaagtgcccaaaacaaggacttgctgtttagccgggggtctccagctggcatgtctgttcagcccaaaaactggctacctggaccctgttaccggcagcagcgcgtttctaaaacaaaaacagacaacaacaacagcaactttacctggactggtgcttcaaaatataaccttaatgggcgtgaatctataatcaaccctggcactgctatggcctcacacaaagacgacaaagacaagttctttcccatgagcggtgtcatgatttttggaaaggagagcgccggagcttcaaacactgcattggacaatgtcatgatcacagacgaagaggaaatcaaagccactaaccccgtggccaccgaaagatttgggactgtggcagtcaatctccagagcagcagcacagaccctgcgaccggagatgtgcatgttatgggagccttacctggaatggtgtggcaagacagagacgtatacctgcagggtcctatttgggccaaaattcctcacacggatggacactttcacccgtctcctctcatgggcggctttggacttaagcacccgcctcctcagatcctcatcaaaaacacgcctgttcctgcgaatcctccggcagagttttcggctacaaagtttgcttcattcatcacccagtattccacaggacaagtgagcgtggagattgaatgggagctgcagaaagaaaacagcaaacgctggaatcccgaagtgcagtatacatctaactatgcaaaatctgccaacgttgatttcactgtggacaacaatggactttatactgagcctcgccccattggcacccgttacctcacccgtcccctgtaa

SEQ ID NO: 5121 - DNA, 2214 bp, Adeno-associated virus 7
atggctgccgatggttatcttccagattggctcgaggacaacctctctgagggcattcgcgagtggtgggacctgaaacctggagccccgaaacccaaagccaaccagcaaaagcaggacaacggccggggtctggtgcttcctggctacaagtacctcggacccttcaacggactcgacaagggggagcccgtcaacgcggcggacgcagcggccctcgagcacgacaaggcctacgaccagcagctcaaagcgggtgacaatccgtacctgcggtataaccacgccgacgccgagtttcaggagcgtctgcaagaagatacgtcatttgggggcaacctcgggcgagcagtcttccaggccaagaagcgggttctcgaacctctcggtctggttgaggaaggcgctaagacggctcctgcaaagaagagaccggtagagccgtcacctcagcgttcccccgactcctccacgggcatcggcaagaaaggccagcagcccgccagaaagagactcaatttcggtcagactggcgactcagagtcagtccccgaccctcaacctctcggagaacctccagcagcgccctctagtgtgggatctggtacagtggctgcaggcggtggcgcaccaatggcagacaataacgaaggtgccgacggagtgggtaatgcctcaggaaattggcattgcgattccacatggctgggcgacagagtcattaccaccagcacccgaacctgggccctgcccacctacaacaaccacctctacaagcaaatctccagtgaaactgcaggtagtaccaacgacaacacctacttcggctacagcaccccctgggggtattttgactttaacagattccactgccacttctcaccacgtgactggcagcgactcatcaacaacaactggggattccggcccaagaagctgcggttcaagctcttcaacatccaggtcaaggaggtcacgacgaatgacggcgttacgaccatcgctaataaccttaccagcacgattcaggtattctcggactcggaataccagctgccgtacgtcctcggctctgcgcaccagggctgcctgcctccgttcccggcggacgtcttcatgattcctcagtacggctacctgactctcaacaatggcagtcagtctgtgggacgttcctccttctactgcctggagtacttcccctctcagatgctgagaacgggcaacaactttgagttcagctacagcttcgaggacgtgcctttccacagcagctacgcacacagccagagcctggaccggctgatgaatcccctcatcgaccagtacttgtactacctggccagaacacagagtaacccaggaggcacagctggcaatcgggaactgcagttttaccagggcgggccttcaactatggccgaacaagccaagaattggttacctggaccttgcttccggcaacaaagagtctccaaaacgctggatcaaaacaacaacagcaactttgcttggactggtgccaccaaatatcacctgaacggcagaaactcgttggttaatcccggcgtcgccatggcaactcacaaggacgacgaggaccgctttttcccatccagcggagtcctgatttttggaaaaactggagcaactaacaaaactacattggaaaatgtgttaatgacaaatgaagaagaaattcgtcctactaatcctgtagccacggaagaatacgggatagtcagcagcaacttacaagcggctaatactgcagcccagacacaagttgtcaacaaccagggagccttacctggcatggtctggcagaaccgggacgtgtacctgcagggtcccatctgggccaagattcctcacacggatggcaactttcacccgtctcctttgatgggcggctttggacttaaacatccgcctcctcagatcctgatcaagaacactcccgttcccgctaatcctccggaggtgtttactcctgccaagtttgcttcgttcatcacacagtacagcaccggacaagtcagcgtggaaatcgagtgggagctgcagaaggaaaacagcaagcgctggaacccggagattcagtacacctccaactttgaaaagcagactggtgtggactttgccgttgacagccagggtgtttactctgagcctcgccctattggcactcgttacctcacccgtaatctgtaa

SEQ ID NO: 5122 - protein, 738 aa, Adeno-associated virus 7
MAADGYLPDWLEDNLSEGIREWWALKPGAPKPKANQQKQDDGRGLVLPGYKYLGPFNGLDKGEPVNAADAAALEHDKAYDQQLQAGDNPYLRYNHADAEFQERLQEDTSFGGNLGRAVFQAKKRVLEPLGLVEEGAKTAPGKKRPVEPSPQRSPDSSTGIGKKGQQPARKRLNFGQTGDSESVPDPQPLGEPPAAPSGVGPNTMAAGGGAPMADNNEGADGVGSSSGNWHCDSTWLGDRVITTSTRTWALPTYNNHLYKQISNGTSGGATNDNTYFGYSTPWGYFDFNRFHCHFSPRDWQRLINNNWGFRPKRLSFKLFNIQVKEVTQNEGTKTIANNLTSTIQVFTDSEYQLPYVLGSAHQGCLPPFPADVFMIPQYGYLTLNNGSQAVGRSSFYCLEYFPSQMLRTGNNFQFTYTFEDVPFHSSYAHSQSLDRLMNPLIDQYLYYLSRTQTTGGTANTQTLGFSQGGPNTMANQAKNWLPGPCYRQQRVSTTTGQNNNSNFAWTAGTKYHLNGRNSLANPGIAMATHKDDEERFFPSNGILIFGKQNAARDNADYSDVMLTSEEEIKTTNPVATEEYGIVADNLQQQNTAPQIGTVNSQGALPGMVWQNRDVYLQGPIWAKIPHTDGNFHPSPLMGGFGLKHPPPQILIKNTPVPADPPTTFNQSKLNSFITQYSTGQVSVEIEWELQKENSKRWNPEIQYTSNYYKSTSVDFAVNTEGVYSEPRPIGTRYLTRNL

SEQ ID NO: 5123 - protein, 737 aa, Adeno-associated virus 7
MAADGYLPDWLEDNLSEGIREWWDLKPGAPKPKANQQKQDNGRGLVLPGYKYLGPFNGLDKGEPVNAADAAALEHDKAYDQQLKAGDNPYLRYNHADAEFQERLQEDTSFGGNLGRAVFQAKKRVLEPLGLVEEGAKTAPAKKRPVEPSPQRSPDSSTGIGKKGQQPARKRLNFGQTGDSESVPDPQPLGEPPAAPSSVGSGTVAAGGGAPMADNNEGADGVGNASGNWHCDSTWLGDRVITTSTRTWALPTYNNHLYKQISSETAGSTNDNTYFGYSTPWGYFDFNRFHCHFSPRDWQRLINNNWGFRPKKLRFKLFNIQVKEVTTNDGVTTIANNLTSTIQVFSDSEYQLPYVLGSAHQGCLPPFPADVFMIPQYGYLTLNNGSQSVGRSSFYCLEYFPSQMLRTGNNFEFSYSFEDVPFHSSYAHSQSLDRLMNPLIDQYLYYLARTQSNPGGTAGNRELQFYQGGPSTMAEQAKNWLPGPCFRQQRVSKTLDQNNNSNFAWTGATKYHLNGRNSLVNPGVAMATHKDDEDRFFPSSGVLIFGKTGATNKTTLENVLMTNEEEIRPTNPVATEEYGIVSSNLQAANTAAQTQVVNNQGALPGMVWQNRDVYLQGPIWAKIPHTDGNFHPSPLMGGFGLKHPPPQILIKNTPVPANPPEVFTPAKFASFITQYSTGQVSVEIEWELQKENSKRWNPEIQYTSNFEKQTGVDFAVDSQGVYSEPRPIGTRYLTRNL

SEQ ID NO: 5124 - protein, 623 aa, Adeno-associated virus 7
MPGFYEIVIKVPSDLDEHLPGISDSFVNWVAEKEWELPPDSDMDLNLIEQAPLTVAEKLQRDFLVQWRRVSKAPEALFFVQFEKGESYFHLHVLVETTGVKSMVLGRFLSQIREKLVQTIYRGVEPTLPNWFAVTKTRNGAGGGNKVVDECYIPNYLLPKTQPELQWAWTNMEEYISACLNLAERKRLVAQHLTHVSQTQEQNKENLNPNSDAPVIRSKTSARYMELVGWLVDRGITSEKQWIQEDQASYISFNAASNSRSQIKAALDNAGKIMALTKSAPDYLVGPSLPADIKTNRIYRILELNGYDPAYAGSVFLGWAQKKFGKRNTIWLFGPATTGKTNIAEAIAHAVPFYGCVNWTNENFPFNDCVDKMVIWWEEGKMTAKVVESAKAILGGSKVRVDQKCKSSAQIDPTPVIVTSNTNMCAVIDGNSTTFEHQQPLQDRMFKFELTRRLEHDFGKVTKQEVKEFFRWASDHVTEVAHEFYVRKGGASKRPAPDDADISEPKRACPSVADPSTSDAEGAPVDFADRYQNKCSRHAGMIQMLFPCKTCERMNQNFNICFTHGVRDCLECFPGVSESQPVVRKKTYRKLCAIHHLLGRAPEIACSACDLVNVDLDDCVSEQ

SEQ ID NO: 5125 - DNA, 4721 bp, Adeno-associated virus 7
ttggccactccctctatgcgcgctcgctcgctcggtggggcctgcggaccaaaggtccgcagacggcagagctctgctctgccggccccaccgagcgagcgagcgcgcatagagggagtggccaactccatcactaggggtaccgcgaagcgcctcccacgctgccgcgtcagcgctgacgtaaatcacgtcataggggagtggtcctgtattagctgtcacgtgagtgcttttgcgacattttgcgacaccacgtggccatttgaggtatatatggccgagtgagcgagcaggatctccattttgaccgcgaaatttgaacgagcagcagccatgccgggtttctacgagatcgtgatcaaggtgccgagcgacctggacgagcacctgccgggcatttctgactcgtttgtgaactgggtggccgagaaggaatgggagctgcccccggattctgacatggatctgaatctgatcgagcaggcacccctgaccgtggccgagaagctgcagcgcgacttcctggtccaatggcgccgcgtgagtaaggccccggaggccctgttctttgttcagttcgagaagggcgagagctacttccaccttcacgttctggtggagaccacgggggtcaagtccatggtgctaggccgcttcctgagtcagattcgggagaagctggtccagaccatctaccgcggggtcgagcccacgctgcccaactggttcgcggtgaccaagacgcgtaatggcgccggcggggggaacaaggtggtggacgagtgctacatccccaactacctcctgcccaagacccagcccgagctgcagtgggcgtggactaacatggaggagtatataagcgcgtgtttgaacctggccgaacgcaaacggctcgtggcgcagcacctgacccacgtcagccagacgcaggagcagaacaaggagaatctgaaccccaattctgacgcgcccgtgatcaggtcaaaaacctccgcgcgctacatggagctggtcgggtggctggtggaccggggcatcacctccgagaagcagtggatccaggaggaccaggcctcgtacatctccttcaacgccgcctccaactcgcggtcccagatcaaggccgcgctggacaatgccggcaagatcatggcgctgaccaaatccgcgcccgactacctggtggggccctcgctgcccgcggacattaaaaccaaccgcatctaccgcatcctggagctgaacgggtacgatcctgcctacgccggctccgtctttctcggctgggcccagaaaaagttcgggaagcgcaacaccatctggctgtttgggcccgccaccaccggcaagaccaacattgcggaagccatcgcccacgccgtgcccttctacggctgcgtcaactggaccaatgagaactttcccttcaacgattgcgtcgacaagatggtgatctggtgggaggagggcaagatgacggccaaggtcgtggagtccgccaaggccattctcggcggcagcaaggtgcgcgtggaccaaaagtgcaagtcgtccgcccagatcgaccccacccccgtgatcgtcacctccaacaccaacatgtgcgccgtgattgacgggaacagcaccaccttcgagcaccagcagccgttgcaggaccggatgttcaaatttgaactcacccgccgtctggagcacgactttggcaaggtgacgaagcaggaagtcaaagagttcttccgctgggccagtgatcacgtgaccgaggtggcgcatgagttctacgtcagaaagggcggagccagcaaaagacccgcccccgatgacgcggatataagcgagcccaagcgggcctgcccctcagtcgcggatccatcgacgtcagacgcggaaggagctccggtggactttgccgacaggtaccaaaacaaatgttctcgtcacgcgggcatgattcagatgctgtttccctgcaaaacgtgcgagagaatgaatcagaatttcaacatttgcttcacacacggggtcagagactgtttagagtgtttccccggcgtgtcagaatctcaaccggtcgtcagaaaaaagacgtatcggaaactctgcgcgattcatcatctgctggggcgggcgcccgagattgcttgctcggcctgcgacctggtcaacgtggacctggacgactgcgtttctgagcaataaatgacttaaaccaggtatggctgccgatggttatcttccagattggctcgaggacaacctctctgagggcattcgcgagtggtgggacctgaaacctggagccccgaaacccaaagccaaccagcaaaagcaggacaacggccggggtctggtgcttcctggctacaagtacctcggacccttcaacggactcgacaagggggagcccgtcaacgcggcggacgcagcggccctcgagcacgacaaggcctacgaccagcagctcaaagcgggtgacaatccgtacctgcggtataaccacgccgacgccgagtttcaggagcgtctgcaagaagatacgtcatttgggggcaacctcgggcgagcagtcttccaggccaagaagcgggttctcgaacctctcggtctggttgaggaaggcgctaagacggctcctgcaaagaagagaccggtagagccgtcacctcagcgttcccccgactcctccacgggcatcggcaagaaaggccagcagcccgccagaaagagactcaatttcggtcagactggcgactcagagtcagtccccgaccctcaacctctcggagaacctccagcagcgccctctagtgtgggatctggtacagtggctgcaggcggtggcgcaccaatggcagacaataacgaaggtgccgacggagtgggtaatgcctcaggaaattggcattgcgattccacatggctgggcgacagagtcattaccaccagcacccgaacctgggccctgcccacctacaacaaccacctctacaagcaaatctccagtgaaactgcaggtagtaccaacgacaacacctacttcggctacagcaccccctgggggtattttgactttaacagattccactgccacttctcaccacgtgactggcagcgactcatcaacaacaactggggattccggcccaagaagctgcggttcaagctcttcaacatccaggtcaaggaggtcacgacgaatgacggcgttacgaccatcgctaataaccttaccagcacgattcaggtattctcggactcggaataccagctgccgtacgtcctcggctctgcgcaccagggctgcctgcctccgttcccggcggacgtcttcatgattcctcagtacggctacctgactctcaacaatggcagtcagtctgtgggacgttcctccttctactgcctggagtacttcccctctcagatgctgagaacgggcaacaactttgagttcagctacagcttcgaggacgtgcctttccacagcagctacgcacacagccagagcctggaccggctgatgaatcccctcatcgaccagtacttgtactacctggccagaacacagagtaacccaggaggcacagctggcaatcgggaactgcagttttaccagggcgggccttcaactatggccgaacaagccaagaattggttacctggaccttgcttccggcaacaaagagtctccaaaacgctggatcaaaacaacaacagcaactttgcttggactggtgccaccaaatatcacctgaacggcagaaactcgttggttaatcccggcgtcgccatggcaactcacaaggacgacgaggaccgctttttcccatccagcggagtcctgatttttggaaaaactggagcaactaacaaaactacattggaaaatgtgttaatgacaaatgaagaagaaattcgtcctactaatcctgtagccacggaagaatacgggatagtcagcagcaacttacaagcggctaatactgcagcccagacacaagttgtcaacaaccagggagccttacctggcatggtctggcagaaccgggacgtgtacctgcagggtcccatctgggccaagattcctcacacggatggcaactttcacccgtctcctttgatgggcggctttggacttaaacatccgcctcctcagatcctgatcaagaacactcccgttcccgctaatcctccggaggtgtttactcctgccaagtttgcttcgttcatcacacagtacagcaccggacaagtcagcgtggaaatcgagtgggagctgcagaaggaaaacagcaagcgctggaacccggagattcagtacacctccaactttgaaaagcagactggtgtggactttgccgttgacagccagggtgtttactctgagcctcgccctattggcactcgttacctcacccgtaatctgtaattgcatgttaatcaataaaccggttgattcgtttcagttgaactttggtctcctgtgcttcttatcttatcggtttccatagcaactggttacacattaactgcttgggtgcgcttcacgataagaacactgacgtcaccgcggtacccctagtgatggagttggccactccctctatgcgcgctcgctcgctcggtggggcctgcggaccaaaggtccgcagacggcagagctctgctctgccggccccaccgagcgagcgagcgcgcatagagggagtggccaa

SEQ ID NO: 5126 - DNA, 2214 bp, Adeno-associated virus 7; identical to SEQ ID NO: 5121

SEQ ID NO: 5127 - protein, 737 aa, Adeno-associated virus 7; identical to SEQ ID NO: 5123

SEQ ID NO: 5128 - DNA, 2217 bp, Adeno-associated virus 8
atggctgccgatggttatcttccagattggctcgaggacaacctctctgagggcattcgcgagtggtgggcgctgaaacctggagccccgaagcccaaagccaaccagcaaaagcaggacgacggccggggtctggtgcttcctggctacaagtacctcggacccttcaacggactcgacaagggggagcccgtcaacgcggcggacgcagcggccctcgagcacgacaaggcctacgaccagcagctgcaggcgggtgacaatccgtacctgcggtataaccacgccgacgccgagtttcaggagcgtctgcaagaagatacgtcttttgggggcaacctcgggcgagcagtcttccaggccaagaagcgggttctcgaacctctcggtctggttgaggaaggcgctaagacggctcctggaaagaagagaccggtagagccatcaccccagcgttctccagactcctctacgggcatcggcaagaaaggccaacagcccgccagaaaaagactcaattttggtcagactggcgactcagagtcagttccagaccctcaacctctcggagaacctccagcagcgccctctggtgtgggacctaatacaatggctgcaggcggtggcgcaccaatggcagacaataacgaaggcgccgacggagtgggtagttcctcgggaaattggcattgcgattccacatggctgggcgacagagtcatcaccaccagcacccgaacctgggccctgcccacctacaacaaccacctctacaagcaaatctccaacgggacatcgggaggagccaccaacgacaacacctacttcggctacagcaccccctgggggtattttgactttaacagattccactgccacttttcaccacgtgactggcagcgactcatcaacaacaactggggattccggcccaagagactcagcttcaagctcttcaacatccaggtcaaggaggtcacgcagaatgaaggcaccaagaccatcgccaataacctcaccagcaccatccaggtgtttacggactcggagtaccagctgccgtacgttctcggctctgcccaccagggctgcctgcctccgttcccggcggacgtgttcatgattccccagtacggctacctaacactcaacaacggtagtcaggccgtgggacgctcctccttctactgcctggaatactttccttcgcagatgctgagaaccggcaacaacttccagtttacttacaccttcgaggacgtgcctttccacagcagctacgcccacagccagagcttggaccggctgatgaatcctctgattgaccagtacctgtactacttgtctcggactcaaacaacaggaggcacggcaaatacgcagactctgggcttcagccaaggtgggcctaatacaatggccaatcaggcaaagaactggctgccaggaccctgttaccgccaacaacgcgtctcaacgacaaccgggcaaaacaacaatagcaactttgcctggactgctgggaccaaataccatctgaatggaagaaattcattggctaatcctggcatcgctatggcaacacacaaagacgacgaggagcgtttttttcccagtaacgggatcctgatttttggcaaacaaaatgctgccagagacaatgcggattacagcgatgtcatgctcaccagcgaggaagaaatcaaaaccactaaccctgtggctacagaggaatacggtatcgtggcagataacttgcagcagcaaaacacggctcctcaaattggaactgtcaacagccagggggccttacccggtatggtctggcagaaccgggacgtgtacctgcagggtcccatctgggccaagattcctcacacggacggcaacttccacccgtctccgctgatgggcggctttggcctgaaacatcctccgcctcagatcctgatcaagaacacgcctgtacctgcggatcctccgaccaccttcaaccagtcaaagctgaactctttcatcacgcaatacagcaccggacaggtcagcgtggaaattgaatgggagctgcagaaggaaaacagcaagcgctggaaccccgagatccagtacacctccaactactacaaatctacaagtgtggactttgctgttaatacagaaggcgtgtactctgaaccccgccccattggcacccgttacctcacccgtaatctgtaa

SEQ ID NO: 5129 - DNA, 2213 bp, Adeno-associated virus 8
atggctgccgatggttatcttccagattggctcgaggacaacctctctgagggcattcgcgagtggtgggcgctgaaacctggagccccgaagcccaaagccaaccagcaaaagcaggacgacggccggggtctggtgcttcctggctacaagtacctcggacccttcaacggactcgacaagggggagcccgtcaacgcggcggacgcagcggccctcgagcacgacaaggcctacgaccagcagctgcaggcgggtgacaatccgtacctgcggtataaccacgccgacgccgagtttcaggagcgtctgcaagaagatacgtcttttgggggcaacctcgggcgagcagtcttccaggccaagaagcgggttctcgaacctctcggtctggttgaggaaggcgctaagacggctcctggaaagaagagaccggtagagccatcaccccagcgttctccagactcctctacgggcatcggcaagaaaggccaacagcccgccagaaaaagactcaattttggtcagactggcgactcagagtcagttccagaccctcaacctctcggagaacctccagcagcgccctctggtgtgggacctaatacaatggctgcaggcggtggcgcaccaatggcagacaataacgaaggcgccgacggagtgggtagttcctcgggaaattggcattgcgattccacatggctgggcgacagagtcatcaccaccagcacccgaacctgggccctgcccacctacaacaaccacctctacaagcaaatctccaacgggacatcgggaggagccaccaacgacaacacctacttcggctacagcaccccctgggggtattttgactttaacagattccactgccacttttcaccacgtgactggcagcgactcatcaacaacaactggggattccggcccaagagactcagcttcaagctcttcaacatccaggtcaaggaggtcacgcagaatgaaggcaccaagaccatcgccaataacctcaccagcaccatccaggtgtttacggactcggagtaccagctgccgtacgttctcggctctgcccaccagggctgcctgcctccgttcccggcggacgtgttcatgattccccagtacggctacctaacactcaacaacggtagtcaggccgtgggacgctcctccttctactgcctggaatactttccttcgcagatgctgagaaccggcaacaacttccagtttacttacaccttcgaggacgtgcctttccacagcagctacgcccacagccagagcttggaccggctgatgaatcctctgattgaccagtacctgtactacttgtctcggactcaaacaacaggaggcacggcaaatacgcagactctgggcttcagccaaggtgggcctaatacaatggccaatcaggcaaagaactggctgccaggaccctgttaccgccaacaacgcgtctcaacgacaaccgggcaaaacaacaatagcaactttgcctggactgctgggaccaaataccatctgaatggaagaaattcattggctaatcctggcatcgctatggcaacacacaaagacgacgaggagcgtttttttcccagtaacgggatcctgatttttggcaaacaaaatgctgccagagacaatgcggattacagcgatgtcatgctcaccagcgaggaagaaatcaaaaccactaaccctgtggctacagaggaatacggtatcgtggcagataacttgcagcagcaaaacacggctcctcaaattggaactgtcaacagccagggggccttacccggtatggtctggcagaaccgggacgtgtacctgcagggtcccatctgggccaagattcctcacacggacggcaacttccacccgtctccgctgatgggcggctttggcctgaaacatcctccgcctcagatcctgatcaagaacacgcctgtacctgcggatcctccgaccaccttcaaccagtcaaagctgaactctttcatcacgcaatacagcaccggacaggtcagcgtggaaattgaatgggagctgcagaaggaaaacagcaagcgctggaaccccgagatccagtacacctccaactactacaaatctacaagtgtggactttgctgtaatacagaaggcgtgtactctgaaccccgccccattggcacccgttacctcacccgtaatctg

SEQ ID NO: 5130 - DNA, 4393 bp, Adeno-associated virus 8
cagagagggagtggccaactccatcactaggggtagcgcgaagcgcctcccacgctgccgcgtcagcgctgacgtaaattacgtcataggggagtggtcctgtattagctgtcacgtgagtgcttttgcggcattttgcgacaccacgtggccatttgaggtatatatggccgagtgagcgagcaggatctccattttgaccgcgaaatttgaacgagcagcagccatgccgggcttctacgagatcgtgatcaaggtgccgagcgacctggacgagcacctgccgggcatttctgactcgtttgtgaactgggtggccgagaaggaatgggagctgcccccggattctgacatggatcggaatctgatcgagcaggcacccctgaccgtggccgagaagctgcagcgcgacttcctggtccaatggcgccgcgtgagtaaggccccggaggccctcttctttgttcagttcgagaagggcgagagctactttcacctgcacgttctggtcgagaccacgggggtcaagtccatggtgctaggccgcttcctgagtcagattcgggaaaagcttggtccagaccatctacccgcggggtcgagccccaccttgcccaactggttcgcggtgaccaaagacgcggtaatggcgccggcgggggggaacaaggtggtggacgagtgctacatccccaactacctcctgcccaagactcagcccgagctgcagtgggcgtggactaacatggaggagtatataagcgcgtgcttgaacctggccgagcgcaaacggctcgtggcgcagcacctgacccacgtcagccagacgcaggagcagaacaaggagaatctgaaccccaattctgacgcgcccgtgatcaggtcaaaaacctccgcgcgctatatggagctggtcgggtggctggtggaccggggcatcacctccgagaagcagtggatccaggaggaccaggcctcgtacatctccttcaacgccgcctccaactcgcggtcccagatcaaggccgcgctggacaatgccggcaagatcatggcgctgaccaaatccgcgcccgactacctggtggggccctcgctgcccgcggacattacccagaaccgcatctaccgcatcctcgctctcaacggctacgaccctgcctacgccggctccgtctttctcggctgggctcagaaaaagttcgggaaacgcaacaccatctggctgtttggacccgccaccaccggcaagaccaacattgcggaagccatcgcccacgccgtgcccttctacggctgcgtcaactggaccaatgagaactttcccttcaatgattgcgtcgacaagatggtgatctggtgggaggagggcaagatgacggccaaggtcgtggagtccgccaaggccattctcggcggcagcaaggtgcgcgtggaccaaaagtgcaagtcgtccgcccagatcgaccccacccccgtgatcgtcacctccaacaccaacatgtgcgccgtgattgacgggaacagcaccaccttcgagcaccagcagcctctccaggaccggatgtttaagttcgaactcacccgccgtctggagcacgactttggcaaggtgacaaagcaggaagtcaaagagttcttccgctgggccagtgatcacgtgaccgaggtggcgcatgagttttacgtcagaaagggcggagccagcaaaagacccgcccccgatgacgcggataaaagcgagcccaagcgggcctgcccctcagtcgcggatccatcgacgtcagacgcggaaggagctccggtggactttgccgacaggtaccaaaacaaatgttctcgtcacgcgggcatgcttcagatgctgtttccctgcaaaacgtgcgagagaatgaatcagaatttcaacatttgcttcacacacggggtcagagactgctcagagtgtttccccggcgtgtcagaatctcaaccggtcgtcagaaagaggacgtatcggaaactctgtgcgattcatcatctgctggggcgggctcccgagattgcttgctcggcctgcgatctggtcaacgtggacctggatgactgtgtttctgagcaataaatgacttaaaccaggtatggctgccgatggttatcttccagattggctcgaggacaacctctctgagggcattcgcgagtggtgggcgctgaaacctggagccccgaagcccaaagccaaccagcaaaagcaggacgacggccggggtctggtgcttcctggctacaagtacctcggacccttcaacggactcgacaagggggagcccgtcaacgcggcggacgcagcggccctcgagcacgacaaggcctacgaccagcagctgcaggcgggtgacaatccgtacctgcggtataaccacgccgacgccgagtttcaggagcgtctgcaagaagatacgtcttttgggggcaacctcgggcgagcagtcttccaggccaagaagcgggttctcgaacctctcggtctggttgaggaaggcgctaagacggctcctggaaagaagagaccggtagagccatcaccccagcgttctccagactcctctacgggcatcggcaagaaaggccaacagcccgccagaaaaagactcaattttggtcagactggcgactcagagtcagttccagaccctcaacctctcggagaacctccagcagcgccctctggtgtgggacctaatacaatggctgcaggcggtggcgcaccaatggcagacaataacgaaggcgccgacggagtgggtagttcctcgggaaattggcattgcgattccacatggctgggcgacagagtcatcaccaccagcacccgaacctgggccctgcccacctacaacaaccacctctacaagcaaatctccaacgggacatcgggaggagccaccaacgacaacacctacttcggctacagcaccccctgggggtattttgactttaacagattccactgccacttttcaccacgtgactggcagcgactcatcaacaacaactggggattccggcccaagagactcagcttcaagctcttcaacatccaggtcaaggaggtcacgcagaatgaaggcaccaagaccatcgccaataacctcaccagcaccatccaggtgtttacggactcggagtaccagctgccgtacgttctcggctctgcccaccagggctgcctgcctccgttcccggcggacgtgttcatgattccccagtacggctacctaacactcaacaacggtagtcaggccgtgggacgctcctccttctactgcctggaatactttccttcgcagatgctgagaaccggcaacaacttccagtttacttacaccttcgaggacgtgcctttccacagcagctacgcccacagccagagcttggaccggctgatgaatcctctgattgaccagtacctgtactacttgtctcggactcaaacaacaggaggcacggcaaatacgcagactctgggcttcagccaaggtgggcctaatacaatggccaatcaggcaaagaactggctgccaggaccctgttaccgccaacaacgcgtctcaacgacaaccgggcaaaacaacaatagcaactttgcctggactgctgggaccaaataccatctgaatggaagaaattcattggctaatcctggcatcgctatggcaacacacaaagacgacgaggagcgtttttttcccagtaacgggatcctgatttttggcaaacaaaatgctgccagagacaatgcggattacagcgatgtcatgctcaccagcgaggaagaaatcaaaaccactaaccctgtggctacagaggaatacggtatcgtggcagataacttgcagcagcaaaacacggctcctcaaattggaactgtcaacagccagggggccttacccggtatggtctggcagaaccgggacgtgtacctgcagggtcccatctgggccaagattcctcacacggacggcaacttccacccgtctccgctgatgggcggctttggcctgaaacatcctccgcctcagatcctgatcaagaacacgcctgtacctgcggatcctccgaccaccttcaaccagtcaaagctgaactctttcatcacgcaatacagcaccggacaggtcagcgtggaaattgaatgggagctgcagaaggaaaacagcaagcgctggaaccccgagatccagtacacctccaactactacaaatctacaagtgtggactttgctgttaatacagaaggcgtgtactctgaaccccgccccattggcacccgttacctcacccgtaatctgtaattgcctgttaatcaataaaccggttgattcgtttcagttgaactttggtctctgcg

SEQ ID NO: 5131 - protein, 738 aa, Adeno-associated virus 8; identical to SEQ ID NO: 5122

SEQ ID NO: 5132 - protein, 737 aa, Adeno-associated virus 8
MAADGYLPDWLEDNLSEGIREWWALKPGAPKPKANQQKQDDGRGLVLPGYKYLGPFNGLDKGEPVNAADAAALEHDKAYDQQLQAGDNPYLRYNHADAEFQERLQEDTSFGGNLGRAVFQAKKRVLEPLGLVEEGAKTAPGKKRPVEPSPQRSPDSSTGIGKKGQQPARKRLNFGQTGDSESVPDPQPLGEPPAAPSGVGPNTMAAGGGAPMADNNEGADGVGSSSGNWHCDSTWLGDRVITTSTRTWALPTYNNHLYKQISNGTSGGATNDNTYFGYSTPWGYFDFNRFHCHFSPRDWQRLINNNWGFRPKRLSFKLFNIQVKEVTQNEGTKTIANNLTSTIQVFTDSEYQLPYVLGSAHQGCLPPFPADVFMIPQYGYLTLNNGSQAVGRSSFYCLEYFPSQMLRTGNNFQFTYTFEDVPFHSSYAHSQSLDRLMNPLIDQYLYYLSRTQTTGGTANTQTLGFSQGGPNTMANQAKNWLPGPCYRQQRVSTTTGQNNNSNFAWTAGTKYHLNGRNSLANPGIAMATHKDDEERFFPSNGILIFGKQNAARDNADYSDVMLTSEEEIKTTNPVATEEYGIVADNLQQQNTAPQIGTVNSQGALPGMVWQNRDVYLQGPIWAKIPHTDGNFHPSPLMGGFGLKHPPPQILIKNTPVPADPPTTFNQSKLNSFITQYSTGQVSVEIEWELQKENSKRWNPEIQYTSNYYKSTSVDFAVIQKACTLNPAPLAPVTSPVI

SEQ ID NO: 5133 - DNA, 2217 bp, Adeno-associated virus 8; identical to SEQ ID NO: 5128

SEQ ID NO: 5134 - DNA, 4385 bp, Adeno-associated virus 9
cagagagggagtggccaactccatcactaggggtaatcgcgaagcgcctcccacgctgccgcgtcagcgctgacgtagattacgtcataggggagtggtcctgtattagctgtcacgtgagtgcttttgcgacattttgcgacaccacatggccatttgaggtatatatggccgagtgagcgagcaggatctccattttgaccgcgaaatttgaacgagcagcagccatgccgggcttctacgagattgtgatcaaggtgccgagcgacctggacgagcacctgccgggcatttctgactcttttgtgaactgggtggccgagaaggaatgggagctgcccccggattctgacatggatcggaatctgatcgagcaggcacccctgaccgtggccgagaagctgcagcgcgacttcctggtccaatggcgccgcgtgagtaaggccccggaggccctcttctttgttcagttcgagaagggcgagagctactttcacctgcacgttctggtcgagaccacgggggtcaagtccatggtgctaggccgcttcctgagtcagattcgggagaagctggtccagaccatctaccgcgggatcgagccgaccctgcccaactggttcgcggtgaccaagacgcgtaatggcgccggcggggggaacaaggtggtggacgagtgctacatccccaactacctcctgcccaagactcagcccgagctgcagtgggcgtggactaacatggaggagtatataagcgcgtgcttgaacctggccgagcgcaaacggctcgtggcgcagcacctgacccacgtcagccagacgcaggagcagaacaaggagaatctgaaccccaattctgacgcgcccgtgatcaggtcaaaaacctccgcgcgctacatggagctggtcgggtggctggtggaccggggcatcacctccgagaagcagtggatccaggaggaccaggcctcgtacatctccttcaacgccgcctccaactcgcggtcccagatcaaggccgcgctggacaatgccggcaagatcatggcgctgaccaaatccgcgcccgactacctggtaggcccttcacttccggtggacattacgcagaaccgcatctaccgcatcctgcagctcaacggctacgaccctgcctacgccggctccgtctttctcggctgggcacaaaagaagttcgggaaacgcaacaccatctggctgtttgggccggccaccacgggaaagaccaacatcgcagaagccattgcccacgccgtgcccttctacggctgcgtcaactggaccaatgagaactttcccttcaacgattgcgtcgacaagatggtgatctggtgggaggagggcaagatgacggccaaggtcgtggagtccgccaaggccattctcggcggcagcaaggtgcgcgtggaccaaaagtgcaagtcgtccgcccagatcgaccccactcccgtgatcgtcacctccaacaccaacatgtgcgccgtgattgacgggaacagcaccaccttcgagcaccagcagcctctccaggaccggatgtttaagttcgaactcacccgccgtctggagcacgactttggcaaggtgacaaagcaggaagtcaaagagttcttccgctgggccagtgatcacgtgaccgaggtggcgcatgagttttacgtcagaaagggcggagccagcaaaagacccgcccccgatgacgcggataaaagcgagcccaagcgggcctgcccctcagtcgcggatccatcgacgtcagacgcggaaggagctccggtggactttgccgacaggtaccaaaacaaatgttctcgtcacgcgggcatgcttcagatgctgcttccctgcaaaacgtgcgagagaatgaatcagaatttcaacatttgcttcacacacggggtcagagactgctcagagtgtttccccggcgtgtcagaatctcaaccggtcgtcagaaagaggacgtatcggaaactctgtgcgattcatcatctgctggggcgggctcccgagattgcttgctcggcctgcgatctggtcaacgtggacctggatgactgtgtttctgagcaataaatgacttaaaccaggtatggctgccgatggttatcttccagattggctcgaggacaacctctctgagggcattcgcgagtggtgggcgctgaaacctggagccccgaagcccaaagccaaccagcaaaagcaggacgacggccggggtctggtgcttcctggctacaagtacctcggacccttcaacggactcgacaagggggagcccgtcaacgcggcggacgcagcggccctcgagcacggcaaggcctacgaccagcagctgcaggcgggtgacaatccgtacctgcggtataaccacgccgacgccgagtttcaggagcgtctgcaagaagatacgtcttttgggggcaacctcgggcgagcagtcttccaggccaagaagcgggttctcgaacctctcggtctggttgaggaaggcgctaagacggctcctggaaagaagagaccggtagagccatcaccccagcgttctccagactcctctacgggcatcggcaagaaaggccaacagcccgccagaaaaagactcaattttggtcagactggcgactcagagtcagttccagaccctcaacctctcggagaacctccagcagcgccctctggtgtgggacctaatacaatggctgcaggcggtggcgcaccaatggcagacaataacgaaggcgccgacggagtgggtaattcctcgggaaattggcattgcgattccacatggctgggggacagagtcatcaccaccagcacccgaacctgggcattgcccacctacaacaaccacctctacaagcaaatctccaatggaacatcgggaggaagcaccaacgacaacacctactttggctacagcaccccctgggggtattttgacttcaacagattccactgccacttctcaccacgtgactggcagcgactcatcaacaacaactggggattccggccaaagagactcaacttcaagctgttcaacatccaggtcaaggaggttacgacgaacgaaggcaccaagaccatcgccaataaccttaccagcaccgtccaggtctttacggactcggagtaccagctaccgtacgtcctaggctctgcccaccaaggatgcctgccaccgtttcctgcagacgtcttcatggttcctcagtacggctacctgacgctcaacaatggaagtcaagcgttaggacgttcttctttctactgtctggaatacttcccttctcagatgctgagaaccggcaacaactttcagttcagctacactttcgaggacgtgcctttccacagcagctacgcacacagccagagtctagatcgactgatgaaccccctcatcgaccagtacctatactacctggtcagaacacagacaactggaactgggggaactcaaactttggcattcagccaagcaggccctagctcaatggccaatcaggctagaaactgggtacccgggccttgctaccgtcagcagcgcgtctccacaaccaccaaccaaaataacaacagcaactttgcgtggacgggagctgctaaattcaagctgaacgggagagactcgctaatgaatcctggcgtggctatggcatcgcacaaagacgacgaggaccgcttctttccatcaagtggcgttctcatatttggcaagcaaggagccgggaacgatggagtcgactacagccaggtgctgattacagatgaggaagaaattaaagccaccaaccctgtagccacagaggaatacggagcagtggccatcaacaaccaggccgctaacacgcaggcgcaaactggacttgtgcataaccagggagttattcctggtatggtctggcagaaccgggacgtgtacctgcagggccctatttgggctaaaatacctcacacagatggcaactttcacccgtctcctctgatgggtggatttggactgaaacacccacctccacagattctaattaaaaatacaccagtgccggcagatcctcctcttaccttcaatcaagccaagctgaactctttcatcacgcagtacagcacgggacaagtcagcgtggaaatcgagtgggagctgcagaaagaaaacagcaagcgctggaatccagagatccagtatacttcaaactactacaaatctacaaatgtggactttgctgtcaataccaaaggtgtttactctgagcctcgccccattggtactcgttacctcacccgtaatttgtaattgcctgttaatcaataaaccggttaattcgtttcagttgaactttggtctctgcg

SEQ ID NO: 5135 - DNA, 4382 bp, Adeno-associated virus 9
cagagagggagtggccaactccatcactaggggtaatcgcgaagcgcctcccacgctgccgcgtcagcgctgacgtagattacgtcataggggagtggtcctgtattagctgtcacgtgagtgcttttgcgacattttgcgacaccacatggccatttgaggtatatatggccgagtgagcgagcaggatctccattttgaccgcgaaatttgaacgagcagcagccatgccgggcttctacgagattgtgatcaaggtgccgagcgacctggacgagcacctgccgggcatttctgactcttttgtgaactgggtggccgagaaggaatgggagctgcccccggattctgacatggatcggaatctgatcgagcaggcacccctgaccgtggccgagaagctgtagcgcgacttcctggtccaatggcgccgcgtgagtaaggccccggaggccctcttctttgttcagttcgagaagggcgagagctactttcacctgcacgttctggtcgagaccacgggggtcaagtccatggtgctaggccgcttcctgagtcagattcgggagaagctggtccagaccatctaccgcgggatcgagccgaccctgcccaactggttcgcggtgaccaagacgcgtaatggcgccggcggggggaacaaggtggtggacgagtgctacatccccaactacctcctgcccaagactcagcccgagctgcagtgggcgtggactaacatggaggagtatataagcgcgtgcttgaacctggccgagcgcaaacggctcgtggcgcagcacctgacccacgtcagccagacgcaggagcagaacaaggagaatctgaaccccaattctgacgcgcccgtgatcaggtcaaaaacctccgcgcgctacatggagctggtcgggtggctggtggaccggggcatcacctccgagaagcagtggatccaggaggaccaggcctcgtacatctccttcaacgccgcctccaactcgcggtcccagatcaaggccgcgctggacaatgccggcaagatcatggcgctgaccaaatccgcgcccgactacctggtaggcccttcacttccggtggacattacgcagaaccgcatctaccgcatcctgcagctcaacggctacgaccctgcctacgccggctccgtctttctcggctgggcacaaaagaagttcgggaaacgcaacaccatctggctgtttgggccggccaccacgggaaagaccaacatcgcagaagccattgcccacgccgtgcccttctacggctgcgtcaactggaccaatgagaactttcccttcaacgattgcgtcgacaagatggtgatctggtgggaggagggcaagatgacggccaaggtcgtggagtccgccaaggccattctcggcggcagcaaggtgcgcgtggaccaaaagtgcaagtcgtccgcccagatcgaccccactcccgtgatcgtcacctccaacaccaacatgtgcgccgtgattgacgggaacagcaccaccttcgagcaccagcagcctctccaggaccggatgtttaagttcgaactcacccgccgtctggagcacgactttggcaaggtgacaaagcaggaagtcaaagagttcttccgctgggccagtgatcacgtgaccgaggtggcgcatgagttttacgtcagaaagggcggagccagcaaaagacccgcccccgatgacgcggataaaagcgagcccaagcgggcctgcccctcagtcgcggatccatcgacgtcagacgcggaaggagctccggtggactttgccgacaggtaccaaaacaaatgttctcgtcacgcgggcatgcttcagatgctgcttccctgcaaaacgtgcgagagaatgaatcagaatttcaacatttgcttcacacacggggtcagagactgctcagagtgtttccccggcgtgtcagaatctcaaccggtcgtcagaaagaggacgtatcggaaactctgtgcgattcatcatctgctggggcgggctcccgagattgcttgctcggcctgcgatctggtcaacgtggacctggatgactgtgtttctgagcaataaatgacttaaaccaggtatggctgccgatggttatcttccagattggctcgaggacaacctctctgagggcattcgcgagtggtgggacctgaaacctggagccccgaaacccaaagccaaccagcaaaagcaggacgacggccggggtctggtgcttcctggctacaagtacctcggacccttcaacggactcgacaagggggagcccgtcaacgcggcggacgcagcggccctcgagcacgacaaggcctacgaccagcagctcaaagcgggtgacaatccgtacctgcggtataaccacgccgacgccgagtttcaggagcgtctgcaagaagatacgtcttttgggggcaacctcgggcgagcagtcttccaggccaagaagcgggttctcgaacctctcggtctggttgaggaaggcgctaagacggctcctggaaagaagagaccggtagagcagtcaccccaagaaccagactcatcctcgggcatcggcaaatcaggccagcagcccgctaaaaagagactcaattttggtcagactggcgactcagagtcagtccccgacccacaacctctcggagaacctccagaagccccctcaggtctgggacctaatacaatggcttcaggcggtggcgctccaatggcagacaataacgaaggcgccgacggagtgggtaattcctcgggaaattggcattgcgattccacatggctgggggacagagtcatcaccaccagcacccgaacctgggcattgcccacctacaacaaccacctctacaagcaaatctccaatggaacatcgggaggaagcaccaacgacaacacctactttggctacagcaccccctgggggtattttgacttcaacagattccactgccacttctcaccacgtgactggcagcgactcatcaacaacaactggggattccggccaaagagactcaacttcaagctgttcaacatccaggtcaaggaggttacgacgaacgaaggcaccaagaccatcgccaataaccttaccagcaccgtccaggtctttacggactcggagtaccagctaccgtacgtcctaggctctgcccaccaaggatgcctgccaccgtttcctgcagacgtcttcatggttcctcagtacggctacctgacgctcaacaatggaagtcaagcgttaggacgttcttctttctactgtctggaatacttcccttctcagatgctgagaaccggcaacaactttcagttcagctacactttcgaggacgtgcctttccacagcagctacgcacacagccagagtctagatcgactgatgaaccccctcatcgaccagtacctatactacctggtcagaacacagacaactggaactgggggaactcaaactttggcattcagccaagcaggccctagctcaatggccaatcaggctagaaactgggtacccgggccttgctaccgtcagcagcgcgtctccacaaccaccaaccaaaataacaacagcaactttgcgtggacgggagctgctaaattcaagctgaacgggagagactcgctaatgaatcctggcgtggctatggcatcgcacaaagacgacgaggaccgcttctttccatcaagtggcgttctcatatttggcaagcaaggagccgggaacgatggagtcgactacagccaggtgctgattacagatgaggaagaaattaaagccaccaaccctgtagccacagaggaatacggagcagtggccatcaacaaccaggccgctaacacgcaggcgcaaactggacttgtgcataaccagggagttattcctggtatggtctggcagaaccgggacgtgtacctgcagggccctatttgggctaaaatacctcacacagatggcaactttcacccgtctcctctgatgggtggatttggactgaaacacccacctccacagattctaattaaaaatacaccagtgccggcagatcctcctcttaccttcaatcaagccaagctgaactctttcatcacgcagtacagcacgggacaagtcagcgtggaaatcgagtgggagctgcagaaagaaaacagcaagcgctggaatccagagatccagtatacttcaaactactacaaatctacaaatgtggactttgctgtcaataccgaaggtgtttactctgagcctcgccccattggtactcgttacctcacccgtaatttgtaattgcctgttaatcaataaaccggttaattcgtttcagttgaactttggtctctgcg

SEQ ID NO: 5136 - protein, 736 aa, Adeno-associated virus 9; identical to SEQ ID NO: 4768

SEQ ID NO: 5137 - protein, 736 aa, Adeno-associated virus 9
MAADGYLPDWLEDNLSEGIREWWDLKPGAPKPKANQQKQDDGRGLVLPGYKYLGPFNGLDKGEPVNAADAAALEHDKAYDQQLKAGDNPYLRYNHADAEFQERLQEDTSFGGNLGRAVFQAKKRVLEPLGLVEEGAKTAPGKKRPVEQSPQEPDSSSGIGKSGQQPAKKRLNFGQTGDSESVPDPQPLGEPPEAPSGLGPNTMASGGGAPMADNNEGADGVGNSSGNWHCDSTWLGDRVITTSTRTWALPTYNNHLYKQISNGTSGGSTNDNTYFGYSTPWGYFDFNRFHCHFSPRDWQRLINNNWGFRPKRLNFKLFNIQVKEVTTNEGTKTIANNLTSTVQVFTDSEYQLPYVLGSAHQGCLPPFPADVFMVPQYGYLTLNNGSQALGRSSFYCLEYFPSQMLRTGNNFQFSYTFEDVPFHSSYAHSQSLDRLMNPLIDQYLYYLVRTQTTGTGGTQTLAFSQAGPSSMANQARNWVPGPCYRQQRVSTTTNQNNNSNFAWTGAAKFKLNGRDSLMNPGVAMASHKDDEDRFFPSSGVLIFGKQGAGNDGVDYSQVLITDEEEIKATNPVATEEYGAVAINNQAANTQAQTGLVHNQGVIPGMVWQNRDVYLQGPIWAKIPHTDGNFHPSPLMGGFGLKHPPPQILIKNTPVPADPPLTFNQAKLNSFITQYSTGQVSVEIEWELQKENSKRWNPEIQYTSNYYKSTNVDFAVNTEGVYSEPRPIGTRYLTRNL

SEQ ID NO: 5138 - protein, 623 aa, Adeno-associated virus 9
MPGFYEIVIKVPSDLDEHLPGISDSFVNWVAEKEWELPPDSDMDRNLIEQAPLTVAEKLQRDFLVQWRRVSKAPEALFFVQFEKGESYFHLHVLVETTGVKSMVLGRFLSQIREKLVQTIYRGIEPTLPNWFAVTKTRNGAGGGNKVVDECYIPNYLLPKTQPELQWAWTNMEEYISACLNLAERKRLVAQHLTHVSQTQEQNKENLNPNSDAPVIRSKTSARYMELVGWLVDRGITSEKQWIQEDQASYISFNAASNSRSQIKAALDNAGKIMALTKSAPDYLVGPSLPVDITQNRIYRILQLNGYDPAYAGSVFLGWAQKKFGKRNTIWLFGPATTGKTNIAEAIAHAVPFYGCVNWTNENFPFNDCVDKMVIWWEEGKMTAKVVESAKAILGGSKVRVDQKCKSSAQIDPTPVIVTSNTNMCAVIDGNSTTFEHQQPLQDRMFKFELTRRLEHDFGKVTKQEVKEFFRWASDHVTEVAHEFYVRKGGASKRPAPDDADKSEPKRACPSVADPSTSDAEGAPVDFADRYQNKCSRHAGMLQMLLPCKTCERMNQNFNICFTHGVRDCSECFPGVSESQPVVRKRTYRKLCAIHHLLGRAPEIACSACDLVNVDLDDCVSEQ

SEQ ID NO: 5139 - DNA, 1797 bp, Artificial Sequence
  Description of Artificial Sequence: Synthetic polynucleotide
acggctccgaccggagacaagcggaaaggcgaagacgaacctcgtttgcccgacacttcttcacagactcccaagaaaaacaagaagcctcgcaaggaaagaccttccggcggggcagaagatccgggcgaaggcacctcttccaacgctggagcagcagcacccgcctctagtgtgggatcatctatcatggctgaaggaggtggcggcccagtgggcgatgcaggccagggtgccgatggagtgggcaattcctccggaaattggcattgcgattcccaatggctggaaaacggagtcgtcactcgaaccacccgaacctgggtcttgcccagctacaacaaccacctgtacaaacgaatccaaggacccagcggaggcgacaacaacaacaaattctttggattcagcaccccctggggatactttgactacaatcgattccactgccacttttccccgcgagactggcaacgactcatcaacaacaactggggcatccgtcccaaagcgatgcgctttagactctttaacatccaggttaaagaggtcacggtccaagacttcaacaccaccatcggcaacaacctcaccagtacggtccaggtctttgcggacaaggactaccaactgccgtacgtcctcggatcggctaccgaaggcaccttcccgccgttcccagcggatatctacacgatcccgcagtacgggtactgcacgctaaactacaacaacgaggcggtggatcgttcggccttctactgtctggactactttccctcagacatgctgcggacaggaaataactttgagtttacttacaccttcgaggacgttcctttccatagcatgtttgcccacaaccagacgctagaccggctgatgaatcccctcgtggatcagtacctctgggctttcagctccgtcagccaagcaggctcatctggacgagctcttcattactcgcgggcgactaaaaccaacatggcggctcaatataggaactggttacctgggcctttcttccgtgatcagcaaatctttacgggcgctagcaacatcactaaaaataacgtctttagcgtttgggaaaaaggcaagcaatgggaactcgacaatcggaccaacctaatgcagcccggtcctgcggcagcgaccacctttagcggagaacctgaccgtcaagccatgcaaaacacgctggcttttagcaggaccgtctacgatcaaacgaccgccacgaccgatcgtaaccagatactcatcaccaacgaagacgaaatcagacccaccaactcggtcggtatcgacgcgtggggagcagttcccaccaacaaccagtcgatcgtgacccccggcactcgcgcggccgtcaacaatcaaggggcgcttcccgggatggtgtggcaaaacagagacatttaccctacagggacccatttggccaaaattcccgacactgacaatcacttccatccgtccccgcttattgggcggtttggctgcaagcatccccctccccagattttcattaaaaacacacccgtccctgccaacccttcggaaacgttccagacggccaaagtggcctccttcatcaaccagtactcgaccggacagtgcaccgtcgaaatcttttgggaactcaagaaggaaacctccaagcgctggaaccccgaaatccagttcacctccaactttggcaacgcggccgacatccagtttgccgtctccgacacgggatcctattccgaacctcgtcccatcggtacccgttaccttaccaaacctctgtaa

SEQ ID NO: 5140 - DNA, 1989 bp, Artificial Sequence
  Description of Artificial Sequence: Synthetic polynucleotide
atgaggtcgtactacgaggtcatcgttcagctgcccaacgacgtcgagagtcaggtacctggaatctccgattcgttcgtcaactggattacgtcgcgagaatggacgttgcctgaggacgccgattgggatttggaccaggtcgatcaagttcaactgacgctcggcgacaaaatccaacgggagattcgaactcattgggggacgatggccaaagaaccggactttcactattttatccaactggaacaaggtgaggtgttctttcatttacacgtcctgctggaaacgtgttccgtaaagccgatggtactcggaagatatatccgacatattcaacaaaaaattgtgagtaaagtctactgcgccacgagcctacgatggaaggatggatgcgtggtgaccaagaccaaaaatttcgggggcgcgaacaaggtccgggccgagtcgtatattcccgcctacctgatcccgaaacagcaaccggaagtgcagtgggcgtggactaacgtgcccgagtatataaaagcgtgcttgcaccgagaactgcgtgccagtctcgcgcgacttcacttcgaggaggcgggcgtctcgcaatccaaggaaaatctcgcgagaactgcagacggcgctcccgtgatgccgacccgcgtcagcaaacgctacatggagctcgtggattggctcgtggagaaggggatcaccaccgagaaggaatggctgctggaaaacagagaaagctttcggagctttcaggcctcgagcaactcggcgcgtcagatcaagacggccctgcaaggcgccattcaggagatgcttctgaccaagacggcggaggactacctcgtcggaaaggatcccgtctcggacgacgacatccgtcagaaccgcatctacaagattctggaactgaaccactacgacccagcgtacgtggggagtattttggtcgggtggtgccagaagaaatggggcaagcgaaacacgctgtggctgttcggacatgcgaccaccggcaagaccaacatcgcggaggctattgcccatgctgtgccgttctatggatgcgttaactggaccaacgagaactttccgttcaacgactgcgtcgaaaaaatgattatctggtgggaggagggcaaaatgaccgccaaagtggtggaaacagccaaggcgattctgggaggatctcgggtgagagtggaccaaaaatgcaaagcttcggttccgatcgaaccgacgccggtcattattaccagtaacaccaacatgtgttatgtcatcgacgggaacacgaccacgttcgagcataagcagccgttggaggacaggatgtttaagctcgaattgctgactcggttgcctgatgactttggtaaggtgaccaaacaggaggtgcgtcaattcttcaggtggtctcaggatcacctgacccctgtgatcccagaattcctagtgcggaaggcggagtctcgcaaaagacccgccccttccggggaaggctatataagcccgacaaagcggcccgcgctcgcagagcagcagcaggcgtcggagagcgcggacccggttcccaccaggtatcgtatcaaatgctcgaaacattgcggtatggataaaatgttgtttccttgccaaatttgtgaatcgatgaacagagatattaatatttgtgctattcataaaacgaccgactgtaaagagtgtttccccgactacggggataaagatgatgtagaactacccccctgtacagaacacaacgtgtctcgttgttatcaatgtcattcgggcgaattgtatcgcgtgacttcggactctgacgagaaacctgcccccgagagtgatgaaggcaccgagccatcctatgctccctgcacgattcaccacctgatgggcaagagtcacgggttagtcacttgcgcggcgtgtcggttgaaaaatagtacgttgcatgatgacttggatgacggtgatctcgaacaataa

SEQ ID NO: 5141 - DNA, 1626 bp, Artificial Sequence
  Description of Artificial Sequence: Synthetic polynucleotide
atgaggtcgtactacgaggtcatcgttcagctgcccaacgacgtcgagagtcaggtacctggaatctccgattcgttcgtcaactggattacgtcgcgagaatggacgttgcctgaggacgccgattgggatttggaccaggtcgatcaagttcaactgacgctcggcgacaaaatccaacgggagattcgaactcattgggggacgatggccaaagaaccggactttcactattttatccaactggaacaaggtgaggtgttctttcatttacacgtcctgctggaaacgtgttccgtaaagccgatggtactcggaagatatatccgacatattcaacaaaaaattgtgagtaaagtctactgcgccacgagcctacgatggaaggatggatgcgtggtgaccaagaccaaaaatttcgggggcgcgaacaaggtccgggccgagtcgtatattcccgcctacctgatcccgaaacagcaaccggaagtgcagtgggcgtggactaacgtgcccgagtatataaaagcgtgcttgcaccgagaactgcgtgccagtctcgcgcgacttcacttcgaggaggcgggcgtctcgcaatccaaggaaaatctcgcgagaactgcagacggcgctcccgtgatgccgacccgcgtcagcaaacgctacatggagctcgtggattggctcgtggagaaggggatcaccaccgagaaggaatggctgctggaaaacagagaaagctttcggagctttcaggcctcgagcaactcggcgcgtcagatcaagacggccctgcaaggcgccattcaggagatgcttctgaccaagacggcggaggactacctcgtcggaaaggatcccgtctcggacgacgacatccgtcagaaccgcatctacaagattctggaactgaaccactacgacccagcgtacgtggggagtattttggtcgggtggtgccagaagaaatggggcaagcgaaacacgctgtggctgttcggacatgcgaccaccggcaagaccaacatcgcggaggctattgcccatgctgtgccgttctatggatgcgttaactggaccaacgagaactttccgttcaacgactgcgtcgaaaaaatgattatctggtgggaggagggcaaaatgaccgccaaagtggtggaaacagccaaggcgattctgggaggatctcgggtgagagtggaccaaaaatgcaaagcttcggttccgatcgaaccgacgccggtcattattaccagtaacaccaacatgtgttatgtcatcgacgggaacacgaccacgttcgagcataagcagccgttggaggacaggatgtttaagctcgaattgctgactcggttgcctgatgactttggtaaggtgaccaaacaggaggtgcgtcaattcttcaggtggtctcaggatcacctgacccctgtgatcccagaattcctagtgcggaaggcggagtctcgcaaaagacccgccccttccggggaaggctatataagcccgacaaagcggcccgcgctcgcagagcagcagcaggcgtcggagagcgcggacccggttcccaccagattggttggagcggttggtcaaaaagggagtgaatgctgcagctga

SEQ ID NO: 5142 - DNA, 1323 bp, Artificial Sequence
  Description of Artificial Sequence: Synthetic polynucleotide
atggagctcgtggattggctcgtggagaaggggatcaccaccgagaaggaatggctgctggaaaacagagaaagctttcggagctttcaggcctcgagcaactcggcgcgtcagatcaagacggccctgcaaggcgccattcaggagatgcttctgaccaagacggcggaggactacctcgtcggaaaggatcccgtctcggacgacgacatccgtcagaaccgcatctacaagattctggaactgaaccactacgacccagcgtacgtggggagtattttggtcgggtggtgccagaagaaatggggcaagcgaaacacgctgtggctgttcggacatgcgaccaccggcaagaccaacatcgcggaggctattgcccatgctgtgccgttctatggatgcgttaactggaccaacgagaactttccgttcaacgactgcgtcgaaaaaatgattatctggtgggaggagggcaaaatgaccgccaaagtggtggaaacagccaaggcgattctgggaggatctcgggtgagagtggaccaaaaatgcaaagcttcggttccgatcgaaccgacgccggtcattattaccagtaacaccaacatgtgttatgtcatcgacgggaacacgaccacgttcgagcataagcagccgttggaggacaggatgtttaagctcgaattgctgactcggttgcctgatgactttggtaaggtgaccaaacaggaggtgcgtcaattcttcaggtggtctcaggatcacctgacccctgtgatcccagaattcctagtgcggaaggcggagtctcgcaaaagacccgccccttccggggaaggctatataagcccgacaaagcggcccgcgctcgcagagcagcagcaggcgtcggagagcgcggacccggttcccaccaggtatcgtatcaaatgctcgaaacattgcggtatggataaaatgttgtttccttgccaaatttgtgaatcgatgaacagagatattaatatttgtgctattcataaaacgaccgactgtaaagagtgtttccccgactacggggataaagatgatgtagaactacccccctgtacagaacacaacgtgtctcgttgttatcaatgtcattcgggcgaattgtatcgcgtgacttcggactctgacgagaaacctgcccccgagagtgatgaaggcaccgagccatcctatgctccctgcacgattcaccacctgatgggcaagagtcacgggttagtcacttgcgcggcgtgtcggttgaaaaatagtacgttgcatgatgacttggatgacggtgatctcgaacaataa

SEQ ID NO: 5143 - DNA, 960 bp, Artificial Sequence
  Description of Artificial Sequence: Synthetic polynucleotide
atggagctcgtggattggctcgtggagaaggggatcaccaccgagaaggaatggctgctggaaaacagagaaagctttcggagctttcaggcctcgagcaactcggcgcgtcagatcaagacggccctgcaaggcgccattcaggagatgcttctgaccaagacggcggaggactacctcgtcggaaaggatcccgtctcggacgacgacatccgtcagaaccgcatctacaagattctggaactgaaccactacgacccagcgtacgtggggagtattttggtcgggtggtgccagaagaaatggggcaagcgaaacacgctgtggctgttcggacatgcgaccaccggcaagaccaacatcgcggaggctattgcccatgctgtgccgttctatggatgcgttaactggaccaacgagaactttccgttcaacgactgcgtcgaaaaaatgattatctggtgggaggagggcaaaatgaccgccaaagtggtggaaacagccaaggcgattctgggaggatctcgggtgagagtggaccaaaaatgcaaagcttcggttccgatcgaaccgacgccggtcattattaccagtaacaccaacatgtgttatgtcatcgacgggaacacgaccacgttcgagcataagcagccgttggaggacaggatgtttaagctcgaattgctgactcggttgcctgatgactttggtaaggtgaccaaacaggaggtgcgtcaattcttcaggtggtctcaggatcacctgacccctgtgatcccagaattcctagtgcggaaggcggagtctcgcaaaagacccgccccttccggggaaggctatataagcccgacaaagcggcccgcgctcgcagagcagcagcaggcgtcggagagcgcggacccggttcccaccagattggttggagcggttggtcaaaaagggagtgaatgctgcagctga

SEQ ID NO: 5144 - DNA, 1608 bp, Artificial Sequence
  Description of Artificial Sequence: Synthetic polynucleotide
atggctgaaggaggtggcggcccagtgggcgatgcaggccagggtgccgatggagtgggcaattcctccggaaattggcattgcgattcccaatggctggaaaacggagtcgtcactcgaaccacccgaacctgggtcttgcccagctacaacaaccacctgtacaaacgaatccaaggacccagcggaggcgacaacaacaacaaattctttggattcagcaccccctggggatactttgactacaatcgattccactgccacttttccccgcgagactggcaacgactcatcaacaacaactggggcatccgtcccaaagcgatgcgctttagactctttaacatccaggttaaagaggtcacggtccaagacttcaacaccaccatcggcaacaacctcaccagtacggtccaggtctttgcggacaaggactaccaactgccgtacgtcctcggatcggctaccgaaggcaccttcccgccgttcccagcggatatctacacgatcccgcagtacgggtactgcacgctaaactacaacaacgaggcggtggatcgttcggccttctactgtctggactactttccctcagacatgctgcggacaggaaataactttgagtttacttacaccttcgaggacgttcctttccatagcatgtttgcccacaaccagacgctagaccggctgatgaatcccctcgtggatcagtacctctgggctttcagctccgtcagccaagcaggctcatctggacgagctcttcattactcgcgggcgactaaaaccaacatggcggctcaatataggaactggttacctgggcctttcttccgtgatcagcaaatctttacgggcgctagcaacatcactaaaaataacgtctttagcgtttgggaaaaaggcaagcaatgggaactcgacaatcggaccaacctaatgcagcccggtcctgcggcagcgaccacctttagcggagaacctgaccgtcaagccatgcaaaacacgctggcttttagcaggaccgtctacgatcaaacgaccgccacgaccgatcgtaaccagatactcatcaccaacgaagacgaaatcagacccaccaactcggtcggtatcgacgcgtggggagcagttcccaccaacaaccagtcgatcgtgacccccggcactcgcgcggccgtcaacaatcaaggggcgcttcccgggatggtgtggcaaaacagagacatttaccctacagggacccatttggccaaaattcccgacactgacaatcacttccatccgtccccgcttattgggcggtttggctgcaagcatccccctccccagattttcattaaaaacacacccgtccctgccaacccttcggaaacgttccagacggccaaagtggcctccttcatcaaccagtactcgaccggacagtgcaccgtcgaaatcttttgggaactcaagaaggaaacctccaagcgctggaaccccgaaatccagttcacctccaactttggcaacgcggccgacatccagtttgccgtctccgacacgggatcctattccgaacctcgtcccatcggtacccgttaccttaccaaacctctgtaa

SEQ ID NO: 5145 - DNA, 2232 bp, Artificial Sequence
  Description of Artificial Sequence: Synthetic polynucleotide
atgtctctcatttctgatgcgattccagattggttggagcggttggtcaaaaagggagtgaatgctgcagctgatttctaccatttggaaagcggtcctcctcgtcctaaggcaaatcagcaaactcaagaatctcttgaaaaggacgattcgagaggtctcgtgttcccaggctacaattatctaggccctttcaacggtctagataaaggagaacccgtcaacgaggcagacgctgccgccttagaacacgacaaggcttacgacctcgaaatcaaggacgggcacaacccgtactttgagtacaacgaggccgacagacgtttccaggaacgtctcaaagacgatacctcctttggaggcaatttaggtaaagccatcttccaggccaaaaagagggttctcgaaccctttggtctggtggaagactcaaagacggctccgaccggagacaagcggaaaggcgaagacgaacctcgtttgcccgacacttcttcacagactcccaagaaaaacaagaagcctcgcaaggaaagaccttccggcggggcagaagatccgggcgaaggcacctcttccaacgctggagcagcagcacccgcctctagtgtgggatcatctatcatggctgaaggaggtggcggcccagtgggcgatgcaggccagggtgccgatggagtgggcaattcctccggaaattggcattgcgattcccaatggctggaaaacggagtcgtcactcgaaccacccgaacctgggtcttgcccagctacaacaaccacctgtacaaacgaatccaaggacccagcggaggcgacaacaacaacaaattctttggattcagcaccccctggggatactttgactacaatcgattccactgccacttttccccgcgagactggcaacgactcatcaacaacaactggggcatccgtcccaaagcgatgcgctttagactctttaacatccaggttaaagaggtcacggtccaagacttcaacaccaccatcggcaacaacctcaccagtacggtccaggtctttgcggacaaggactaccaactgccgtacgtcctcggatcggctaccgaaggcaccttcccgccgttcccagcggatatctacacgatcccgcagtacgggtactgcacgctaaactacaacaacgaggcggtggatcgttcggccttctactgtctggactactttccctcagacatgctgcggacaggaaataactttgagtttacttacaccttcgaggacgttcctttccatagcatgtttgcccacaaccagacgctagaccggctgatgaatcccctcgtggatcagtacctctgggctttcagctccgtcagccaagcaggctcatctggacgagctcttcattactcgcgggcgactaaaaccaacatggcggctcaatataggaactggttacctgggcctttcttccgtgatcagcaaatctttacgggcgctagcaacatcactaaaaataacgtctttagcgtttgggaaaaaggcaagcaatgggaactcgacaatcggaccaacctaatgcagcccggtcctgcggcagcgaccacctttagcggagaacctgaccgtcaagccatgcaaaacacgctggcttttagcaggaccgtctacgatcaaacgaccgccacgaccgatcgtaaccagatactcatcaccaacgaagacgaaatcagacccaccaactcggtcggtatcgacgcgtggggagcagttcccaccaacaaccagtcgatcgtgacccccggcactcgcgcggccgtcaacaatcaaggggcgcttcccgggatggtgtggcaaaacagagacatttaccctacagggacccatttggccaaaattcccgacactgacaatcacttccatccgtccccgcttattgggcggtttggctgcaagcatccccctccccagattttcattaaaaacacacccgtccctgccaacccttcggaaacgttccagacggccaaagtggcctccttcatcaaccagtactcgaccggacagtgcaccgtcgaaatcttttgggaactcaagaaggaaacctccaagcgctggaaccccgaaatccagttcacctccaactttggcaacgcggccgacatccagtttgccgtctccgacacgggatcctattccgaacctcgtcccatcggtacccgttaccttaccaaacctctgtaa

SEQ ID NO: 5146 - protein, 535 aa, Artificial Sequence
  Description of Artificial Sequence: Synthetic polypeptide
MAEGGGGPVGDAGQGADGVGNSSGNWHCDSQWLENGVVTRTTRTWVLPSYNNHLYKRIQGPSGGDNNNKFFGFSTPWGYFDYNRFHCHFSPRDWQRLINNNWGIRPKAMRFRLFNIQVKEVTVQDFNTTIGNNLTSTVQVFADKDYQLPYVLGSATEGTFPPFPADIYTIPQYGYCTLNYNNEAVDRSAFYCLDYFPSDMLRTGNNFEFTYTFEDVPFHSMFAHNQTLDRLMNPLVDQYLWAFSSVSQAGSSGRALHYSRATKTNMAAQYRNWLPGPFFRDQQIFTGASNITKNNVFSVWEKGKQWELDNRTNLMQPGPAAATTFSGEPDRQAMQNTLAFSRTVYDQTTATTDRNQILITNEDEIRPTNSVGIDAWGAVPTNNQSIVTPGTRAAVNNQGALPGMVWQNRDIYPTGTHLAKIPDTDNHFHPSPLIGRFGCKHPPPQIFIKNTPVPANPSETFQTAKVASFINQYSTGQCTVEIFWELKKETSKRWNPEIQFTSNFGNAADIQFAVSDTGSYSEPRPIGTRYLTKPL

SEQ ID NO: 5147 - protein, 440 aa, Artificial Sequence
  Description of Artificial Sequence: Synthetic polypeptide
MELVDWLVEKGITTEKEWLLENRESFRSFQASSNSARQIKTALQGAIQEMLLTKTAEDYLVGKDPVSDDDIRQNRIYKILELNHYDPAYVGSILVGWCQKKWGKRNTLWLFGHATTGKTNIAEAIAHAVPFYGCVNWTNENFPFNDCVEKMIIWWEEGKMTAKVVETAKAILGGSRVRVDQKCKASVPIEPTPVIITSNTNMCYVIDGNTTTFEHKQPLEDRMFKLELLTRLPDDFGKVTKQEVRQFFRWSQDHLTPVIPEFLVRKAESRKRPAPSGEGYISPTKRPALAEQQQASESADPVPTRYRIKCSKHCGMDKMLFPCQICESMNRDINICAIHKTTDCKECFPDYGDKDDVELPPCTEHNVSRCYQCHSGELYRVTSDSDEKPAPESDEGTEPSYAPCTIHHLMGKSHGLVTCAACRLKNSTLHDDLDDGDLEQ

SEQ ID NO: 5148 - protein, 319 aa, Artificial Sequence
  Description of Artificial Sequence: Synthetic polypeptide
MELVDWLVEKGITTEKEWLLENRESFRSFQASSNSARQIKTALQGAIQEMLLTKTAEDYLVGKDPVSDDDIRQNRIYKILELNHYDPAYVGSILVGWCQKKWGKRNTLWLFGHATTGKTNIAEAIAHAVPFYGCVNWTNENFPFNDCVEKMIIWWEEGKMTAKVVETAKAILGGSRVRVDQKCKASVPIEPTPVIITSNTNMCYVIDGNTTTFEHKQPLEDRMFKLELLTRLPDDFGKVTKQEVRQFFRWSQDHLTPVIPEFLVRKAESRKRPAPSGEGYISPTKRPALAEQQQASESADPVPTRLVGAVGQKGSECCS

SEQ ID NO: 5149 - protein, 662 aa, Artificial Sequence
  Description of Artificial Sequence: Synthetic polypeptide
MRSYYEVIVQLPNDVESQVPGISDSFVNWITSREWTLPEDADWDLDQVDQVQLTLGDKIQREIRTHWGTMAKEPDFHYFIQLEQGEVFFHLHVLLETCSVKPMVLGRYIRHIQQKIVSKVYCATSLRWKDGCVVTKTKNFGGANKVRAESYIPAYLIPKQQPEVQWAWTNVPEYIKACLHRELRASLARLHFEEAGVSQSKENLARTADGAPVMPTRVSKRYMELVDWLVEKGITTEKEWLLENRESFRSFQASSNSARQIKTALQGAIQEMLLTKTAEDYLVGKDPVSDDDIRQNRIYKILELNHYDPAYVGSILVGWCQKKWGKRNTLWLFGHATTGKTNIAEAIAHAVPFYGCVNWTNENFPFNDCVEKMIIWWEEGKMTAKVVETAKAILGGSRVRVDQKCKASVPIEPTPVIITSNTNMCYVIDGNTTTFEHKQPLEDRMFKLELLTRLPDDFGKVTKQEVRQFFRWSQDHLTPVIPEFLVRKAESRKRPAPSGEGYISPTKRPALAEQQQASESADPVPTRYRIKCSKHCGMDKMLFPCQICESMNRDINICAIHKTTDCKECFPDYGDKDDVELPPCTEHNVSRCYQCHSGELYRVTSDSDEKPAPESDEGTEPSYAPCTIHHLMGKSHGLVTCAACRLKNSTLHDDLDDGDLEQ

SEQ ID NO: 5150 - protein, 541 aa, Artificial Sequence
  Description of Artificial Sequence: Synthetic polypeptide
MRSYYEVIVQLPNDVESQVPGISDSFVNWITSREWTLPEDADWDLDQVDQVQLTLGDKIQREIRTHWGTMAKEPDFHYFIQLEQGEVFFHLHVLLETCSVKPMVLGRYIRHIQQKIVSKVYCATSLRWKDGCVVTKTKNFGGANKVRAESYIPAYLIPKQQPEVQWAWTNVPEYIKACLHRELRASLARLHFEEAGVSQSKENLARTADGAPVMPTRVSKRYMELVDWLVEKGITTEKEWLLENRESFRSFQASSNSARQIKTALQGAIQEMLLTKTAEDYLVGKDPVSDDDIRQNRIYKILELNHYDPAYVGSILVGWCQKKWGKRNTLWLFGHATTGKTNIAEAIAHAVPFYGCVNWTNENFPFNDCVEKMIIWWEEGKMTAKVVETAKAILGGSRVRVDQKCKASVPIEPTPVIITSNTNMCYVIDGNTTTFEHKQPLEDRMFKLELLTRLPDDFGKVTKQEVRQFFRWSQDHLTPVIPEFLVRKAESRKRPAPSGEGYISPTKRPALAEQQQASESADPVPTRLVGAVGQKGSECCS

SEQ ID NO: 5151 - protein, 743 aa, Artificial Sequence
  Description of Artificial Sequence: Synthetic polypeptide
MSLISDAIPDWLERLVKKGVNAAADFYHLESGPPRPKANQQTQESLEKDDSRGLVFPGYNYLGPFNGLDKGEPVNEADAAALEHDKAYDLEIKDGHNPYFEYNEADRRFQERLKDDTSFGGNLGKAIFQAKKRVLEPFGLVEDSKTAPTGDKRKGEDEPRLPDTSSQTPKKNKKPRKERPSGGAEDPGEGTSSNAGAAAPASSVGSSIMAEGGGGPVGDAGQGADGVGNSSGNWHCDSQWLENGVVTRTTRTWVLPSYNNHLYKRIQGPSGGDNNNKFFGFSTPWGYFDYNRFHCHFSPRDWQRLINNNWGIRPKAMRFRLFNIQVKEVTVQDFNTTIGNNLTSTVQVFADKDYQLPYVLGSATEGTFPPFPADIYTIPQYGYCTLNYNNEAVDRSAFYCLDYFPSDMLRTGNNFEFTYTFEDVPFHSMFAHNQTLDRLMNPLVDQYLWAFSSVSQAGSSGRALHYSRATKTNMAAQYRNWLPGPFFRDQQIFTGASNITKNNVFSVWEKGKQWELDNRTNLMQPGPAAATTFSGEPDRQAMQNTLAFSRTVYDQTTATTDRNQILITNEDEIRPTNSVGIDAWGAVPTNNQSIVTPGTRAAVNNQGALPGMVWQNRDIYPTGTHLAKIPDTDNHFHPSPLIGRFGCKHPPPQIFIKNTPVPANPSETFQTAKVASFINQYSTGQCTVEIFWELKKETSKRWNPEIQFTSNFGNAADIQFAVSDTGSYSEPRPIGTRYLTKPL

SEQ ID NO: 5152 - protein, 598 aa, Artificial Sequence
  Description of Artificial Sequence: Synthetic polypeptide
TAPTGDKRKGEDEPRLPDTSSQTPKKNKKPRKERPSGGAEDPGEGTSSNAGAAAPASSVGSSIMAEGGGGPVGDAGQGADGVGNSSGNWHCDSQWLENGVVTRTTRTWVLPSYNNHLYKRIQGPSGGDNNNKFFGFSTPWGYFDYNRFHCHFSPRDWQRLINNNWGIRPKAMRFRLFNIQVKEVTVQDFNTTIGNNLTSTVQVFADKDYQLPYVLGSATEGTFPPFPADIYTIPQYGYCTLNYNNEAVDRSAFYCLDYFPSDMLRTGNNFEFTYTFEDVPFHSMFAHNQTLDRLMNPLVDQYLWAFSSVSQAGSSGRALHYSRATKTNMAAQYRNWLPGPFFRDQQIFTGASNITKNNVFSVWEKGKQWELDNRTNLMQPGPAAATTFSGEPDRQAMQNTLAFSRTVYDQTTATTDRNQILITNEDEIRPTNSVGIDAWGAVPTNNQSIVTPGTRAAVNNQGALPGMVWQNRDIYPTGTHLAKIPDTDNHFHPSPLIGRFGCKHPPPQIFIKNTPVPANPSETFQTAKVASFINQYSTGQCTVEIFWELKKETSKRWNPEIQFTSNFGNAADIQFAVSDTGSYSEPRPIGTRYLTKPL

SEQ ID NO: 5153 - DNA, 4694 bp, Artificial Sequence
  Description of Artificial Sequence: Synthetic polynucleotide
tggccagtttccaagacaggctcgctcgctcactcgggccggggccccaaaggggcccctagcgaccgcttcgcggtcgcggcccgagtgagcgagcgagcctgtcttggaaactggccagcactccggtgaggtaatgccgtcacgtggtcgggaatgggaacgggaaatctcgcgagaacgtaaacaaatataagacggcgccacacggcgctgcgtcatacgcgcgcgcgcaccggcgagatgaggtcgtactacgaggtcatcgttcagctgcccaacgacgtcgagagtcaggtacctggaatctccgattcgttcgtcaactggattacgtcgcgagaatggacgttgcctgaggacgccgattgggatttggaccaggtcgatcaagttcaactgacgctcggcgacaaaatccaacgggagattcgaactcattgggggacgatggccaaagaaccggactttcactattttatccaactggaacaaggtgaggtgttctttcatttacacgtcctgctggaaacgtgttccgtaaagccgatggtactcggaagatatatccgacatattcaacaaaaaattgtgagtaaagtctactgcgccacgagcctacgatggaaggatggatgcgtggtgaccaagaccaaaaatttcgggggcgcgaacaaggtccgggccgagtcgtatattcccgcctacctgatcccgaaacagcaaccggaagtgcagtgggcgtggactaacgtgcccgagtatataaaagcgtgcttgcaccgagaactgcgtgccagtctcgcgcgacttcacttcgaggaggcgggcgtctcgcaatccaaggaaaatctcgcgagaactgcagacggcgctcccgtgatgccgacccgcgtcagcaaacgctacatggagctcgtggattggctcgtggagaaggggatcaccaccgagaaggaatggctgctggaaaacagagaaagctttcggagctttcaggcctcgagcaactcggcgcgtcagatcaagacggccctgcaaggcgccattcaggagatgcttctgaccaagacggcggaggactacctcgtcggaaaggatcccgtctcggacgacgacatccgtcagaaccgcatctacaagattctggaactgaaccactacgacccagcgtacgtggggagtattttggtcgggtggtgccagaagaaatggggcaagcgaaacacgctgtggctgttcggacatgcgaccaccggcaagaccaacatcgcggaggctattgcccatgctgtgccgttctatggatgcgttaactggaccaacgagaactttccgttcaacgactgcgtcgaaaaaatgattatctggtgggaggagggcaaaatgaccgccaaagtggtggaaacagccaaggcgattctgggaggatctcgggtgagagtggaccaaaaatgcaaagcttcggttccgatcgaaccgacgccggtcattattaccagtaacaccaacatgtgttatgtcatcgacgggaacacgaccacgttcgagcataagcagccgttggaggacaggatgtttaagctcgaattgctgactcggttgcctgatgactttggtaaggtgaccaaacaggaggtgcgtcaattcttcaggtggtctcaggatcacctgacccctgtgatcccagaattcctagtgcggaaggcggagtctcgcaaaagacccgccccttccggggaaggctatataagcccgacaaagcggcccgcgctcgcagagcagcagcaggcgtcggagagcgcggacccggttcccaccaggtatcgtatcaaatgctcgaaacattgcggtatggataaaatgttgtttccttgccaaatttgtgaatcgatgaacagagatattaatatttgtgctattcataaaacgaccgactgtaaagagtgtttccccgactacggggataaagatgatgtagaactacccccctgtacagaacacaacgtgtctcgttgttatcaatgtcattcgggcgaattgtatcgcgtgacttcggactctgacgagaaacctgcccccgagagtgatgaaggcaccgagccatcctatgctccctgcacgattcaccacctgatgggcaagagtcacgggttagtcacttgcgcggcgtgtcggttgaaaaatagtacgttgcatgatgacttggatgacggtgatctcgaacaataaatgattgaaatgtagccatgtctctcatttctgatgcgattccagattggttggagcggttggtcaaaaagggagtgaatgctgcagctgatttctaccatttggaaagcggtcctcctcgtcctaaggcaaatcagcaaactcaagaatctcttgaaaaggacgattcgagaggtctcgtgttcccaggctacaattatctaggccctttcaacggtctagataaaggagaacccgtcaacgaggcagacgctgccgccttagaacacgacaaggcttacgacctcgaaatcaaggacgggcacaacccgtactttgagtacaacgaggccgacagacgtttccaggaacgtctcaaagacgatacctcctttggaggcaatttaggtaaagccatcttccaggccaaaaagagggttctcgaaccctttggtctggtggaagactcaaagacggctccgaccggagacaagcggaaaggcgaagacgaacctcgtttgcccgacacttcttcacagactcccaagaaaaacaagaagcctcgcaaggaaagaccttccggcggggcagaagatccgggcgaaggcacctcttccaacgctggagcagcagcacccgcctctagtgtgggatcatctatcatggctgaaggaggtggcggcccagtgggcgatgcaggccagggtgccgatggagtgggcaattcctccggaaattggcattgcgattcccaatggctggaaaacggagtcgtcactcgaaccacccgaacctgggtcttgcccagctacaacaaccacctgtacaaacgaatccaaggacccagcggaggcgacaacaacaacaaattctttggattcagcaccccctggggatactttgactacaatcgattccactgccacttttccccgcgagactggcaacgactcatcaacaacaactggggcatccgtcccaaagcgatgcgctttagactctttaacatccaggttaaagaggtcacggtccaagacttcaacaccaccatcggcaacaacctcaccagtacggtccaggtctttgcggacaaggactaccaactgccgtacgtcctcggatcggctaccgaaggcaccttcccgccgttcccagcggatatctacacgatcccgcagtacgggtactgcacgctaaactacaacaacgaggcggtggatcgttcggccttctactgtctggactactttccctcagacatgctgcggacaggaaataactttgagtttacttacaccttcgaggacgttcctttccatagcatgtttgcccacaaccagacgctagaccggctgatgaatcccctcgtggatcagtacctctgggctttcagctccgtcagccaagcaggctcatctggacgagctcttcattactcgcgggcgactaaaaccaacatggcggctcaatataggaactggttacctgggcctttcttccgtgatcagcaaatctttacgggcgctagcaacatcactaaaaataacgtctttagcgtttgggaaaaaggcaagcaatgggaactcgacaatcggaccaacctaatgcagcccggtcctgcggcagcgaccacctttagcggagaacctgaccgtcaagccatgcaaaacacgctggcttttagcaggaccgtctacgatcaaacgaccgccacgaccgatcgtaaccagatactcatcaccaacgaagacgaaatcagacccaccaactcggtcggtatcgacgcgtggggagcagttcccaccaacaaccagtcgatcgtgacccccggcactcgcgcggccgtcaacaatcaaggggcgcttcccgggatggtgtggcaaaacagagacatttaccctacagggacccatttggccaaaattcccgacactgacaatcacttccatccgtccccgcttattgggcggtttggctgcaagcatccccctccccagattttcattaaaaacacacccgtccctgccaacccttcggaaacgttccagacggccaaagtggcctccttcatcaaccagtactcgaccggacagtgcaccgtcgaaatcttttgggaactcaagaaggaaacctccaagcgctggaaccccgaaatccagttcacctccaactttggcaacgcggccgacatccagtttgccgtctccgacacgggatcctattccgaacctcgtcccatcggtacccgttaccttaccaaacctctgtaaattaaacccttcaataaaccgtttatgcgtaactgtatttccgtctcctgtcgttattcagtcacatgatgcggcattacctcaccggagtgctggccagtttccaagacaggctcgctcgctcactcgggccggggccccaaaggggcccctagcgaccgcttcgcggtcgcggcccgagtgagcgagcgagcctgtcttggaaactggcca

SEQ ID NO: 5154 - DNA, 2211 bp, Artificial Sequence
  Description of Artificial Sequence: Synthetic polynucleotide
atggctgctgatggttatcttccagattggctcgaggacactctctctgaaggaataagacagtggtggaagctcaaacctggcccaccaccaccaaagcccgcagagcggcataaggacgacagcaggggtcttgtgcttcctgggtacaagtacctcggacccttcaacggactcgacaagggagagccggtcaacgaggcagacgcagcggccctcgagcacgacaaggcctacgaccagcagctcaaggccggtgacaacccctacctcaagtacaaccacgccgacgcggagttccagcagcggcttcagggcgacacatcgtttgggggcaacctcggcagagcagtcttccaggccaaaaagagggttcttgaacctcttggtctggttgagcaagcgggtgagacggctcctggaaagaagagaccgttgattgaatccccccagcagcccgactcctccacgggtatcggcaaaaaaggcaagcagccggctaaaaagagactcaattttggtcagactggcgactcagagtcagtccccgacccacaacctctcggagaacctccagcaacccccgctgctgtgggacctactacaatggcttcaggtggtggcgcaccaatggcagacaataacgaaggcgccgacggagtgggtaatgcctcaggaaattggcattgcgattccacatggctgggcgacagagtcatcaccaccagcacccgcacctgggccttgcccacctacaataaccacctctacaagcaaatctccagtgcttcaacgggggccagcaacgacaaccactacttcggctacagcaccccctgggggtattttgacttcaacagattccactgccacttttcaccacgtgactggcagcgactcatcaacaacaattggggattccggcccaagagactcaacttcaaactcttcaacatccaagtcaaggaggtcacgacgaatgatggcgtcacaaccatcgctaataaccttaccagcacggttcaagtcttctcggactcagactatcagctcccgtacgtgctcgggtcggctcacgagggctgcctcccgccgttcccagcagacgtcttcatggtgccacagtatggatacctcaccctgaacaacgggagtcaggcagtaggacgctcttcattttactgcctggagtactttccttctcagatgctgcgtaccggaaacaactttaccttcagctacacttttgaggacgttcctttccacagcagctacgctcacagccagagtctggaccgtctcatgaatcctctcatcgaccagtacctgtattacctgaacagaactcagaatcagtccggaagtgcccaaaacaaggacttgctgtttagccgggggtctccagctggcatgtctgttcagcccaaaaactggctacctggaccctgttatcggcagcagcgcgtttctaaaacaaaaacagacaacaacaacagcaactttacctggactggtgcttcaaaatataaccttaatgggcgtgaatctataatcaaccctggcactgctatggcctcacacaaagacgacaaagacaagttctttcccatgagcggtgtcatgatttttggaaaggagagcgccggagcttcaaacactgcattggacaatgtcatgatcacagacgaagaggaaatcaaagccactaaccccgtggccaccgaaagatttgggactgtggcagtcaatctccagagcagcagcacagaccctgcgaccggagatgtgcatgttatgggagccttacctggaatggtgtggcaagacagagacgtatacctgcagggtcccatttgggccaaaattcctcacacagatggacactttcacccgtctcctcttatgggcggctttggactcaagaacccgcctcctcagatcctcatcaaaaacacgcctgttcctgcgaatcctccggcggagttttcagctacaaagtttgcttcattcatcacccaatactccacaggacaagtgagtgtggaaattgaatgggagctgcagaaagaaaacagcaagcgctggaatcccgaagtgcagtacacatccaattatgcaaaatctgccaacgttgattttactgtggacaacaatggactttatactgagcctcgccccattggcacccgttacctcacccgtcccctgtaa

SEQ ID NO: 5155 - protein, 736 aa, Artificial Sequence
  Description of Artificial Sequence: Synthetic polypeptide
MAADGYLPDWLEDTLSEGIRQWWKLKPGPPPPKPAERHKDDSRGLVLPGYKYLGPFNGLDKGEPVNEADAAALEHDKAYDQQLKAGDNPYLKYNHADAEFQQRLQGDTSFGGNLGRAVFQAKKRVLEPLGLVEQAGETAPGKKRPLIESPQQPDSSTGIGKKGKQPAKKRLNFGQTGDSESVPDPQPLGEPPATPAAVGPTTMASGGGAPMADNNEGADGVGNASGNWHCDSTWLGDRVITTSTRTWALPTYNNHLYKQISSASTGASNDNHYFGYSTPWGYFDFNRFHCHFSPRDWQRLINNNWGFRPKRLNFKLFNIQVKEVTTNDGVTTIANNLTSTVQVFSDSDYQLPYVLGSAHEGCLPPFPADVFMVPQYGYLTLNNGSQAVGRSSFYCLEYFPSQMLRTGNNFTFSYTFEDVPFHSSYAHSQSLDRLMNPLIDQYLYYLNRTQNQSGSAQNKDLLFSRGSPAGMSVQPKNWLPGPCYRQQRVSKTKTDNNNSNFTWTGASKYNLNGRESIINPGTAMASHKDDKDKFFPMSGVMIFGKESAGASNTALDNVMITDEEEIKATNPVATERFGTVAVNLQSSSTDPATGDVHVMGALPGMVWQDRDVYLQGPIWAKIPHTDGHFHPSPLMGGFGLKNPPPQILIKNTPVPANPPAEFSATKFASFITQYSTGQVSVEIEWELQKENSKRWNPEVQYTSNYAKSANVDFTVDNNGLYTEPRPIGTRYLTRPL

SEQ ID NO: 5156 - DNA, 2211 bp, Artificial Sequence
  Description of Artificial Sequence: Synthetic polynucleotide
atggcttccgatggttatcttccagattggctcgaggacaacctctctgagggcatccgcgagtggtgggacttgaaacctggagccccgaaacccaaagccaaccagcaaaagcaggacgacggccggggtctggtgcttcctggctacaagtacctcggacccttcaacggactcgacaagggggagcccgtcaacgcggcggatgcagcggccctcgagcacgacaaggcctacgaccagcagctcagagcgggtgacaatccgtacctgcggtataaccacgccgacgccgagtttcaggagcgtctgcaagaagatacgtcttttgggggcaacctcgggcgagcagtcttccaggccaagaagagggttctcgaaccttttggtctggttgaggaaggtgctaagacggctcctggaaagaaacgtccggtagagcagtcgccacaagagccagactcctcctcgggcattggcaagacaggccagcagcccgctaaaaagagactcaattttggtcagactggcgactcagagtcagtccccgacccacaacctctcggagaacctccagcaacccccgctgctgtgggacctactacaatggcttcaggcggtggcgcaccaatggcagacaataacgaaggcgccgacggagtgggtaatgcctcaggaaattggcattgcgattccacatggctgggcgacagagtcatcaccaccagcacccgaacatgggccttgcccacctataacaaccacctctacaagcaaatctccagtgcttcaacgggggccagcaacgacaaccactacttcggctacagcaccccctgggggtattttgatttcaacagattccactgccatttctcaccacgtgactggcagcgactcatcaacaacaattggggattccggcccaagagactcaacttcaaactcttcaacatccaagtcaaggaggtcacgacgaatgatggcgtcacaaccatcgctaataaccttaccagcacggttcaagtcttctcggactcggagtaccagcttccgtacgtcctcggctctgcgcaccagggctgcctccctccgttcccggcggacgtgttcatgattccgcagtacggctacctaacgctcaacaatggcagccaggcagtgggacggtcatccttttactgcctggaatatttcccatcgcagatgctgagaacgggcaataactttaccttcagctacaccttcgaggacgtgcctttccacagcagctacgcgcacagccagagcctggaccggctgatgaatcctctcatcgaccagtacctgtattacctgaacagaactcagaatcagtccggaagtgcccaaaacaaggacttgctgtttagccgggggtctccagctggcatgtctgttcagcccaaaaactggctacctggaccctgttaccggcagcagcgcgtttctaaaacaaaaacagacaacaacaacagcaactttacctggactggtgcttcaaaatataaccttaatgggcgtgaatctataatcaaccctggcactgctatggcctcacacaaagacgacaaagacaagttctttcccatgagcggtgtcatgatttttggaaaggagagcgccggagcttcaaacactgcattggacaatgtcatgatcacagacgaagaggaaatcaaagccactaaccccgtggccaccgaaagatttgggactgtggcagtcaatctccagagcagcagcacagaccctgcgaccggagatgtgcatgttatgggagccttacctggaatggtgtggcaagacagagacgtatacctgcagggtcccatttgggccaaaattcctcacacagatggacactttcacccgtctcctcttatgggcggctttggacttaagcacccgcctcctcagatcctcatcaaaaacacgcctgttcctgcgaatcctccggcagagttttcggctacaaagtttgcttcattcatcacccagtattctactggccaagtcagcgtggagattgaatgggagctgcagaaagaaaacagcaaacgctggaatcccgaagtgcagtatacatctaactatgcaaaatctgccaacgttgatttcactgtggacaacaatggactttatactgagcctcgtcccattggcacccgttacctcacccgtcccctgtaa

SEQ ID NO: 5157 - protein, 736 aa, Artificial Sequence
  Description of Artificial Sequence: Synthetic polypeptide
MASDGYLPDWLEDNLSEGIREWWDLKPGAPKPKANQQKQDDGRGLVLPGYKYLGPFNGLDKGEPVNAADAAALEHDKAYDQQLRAGDNPYLRYNHADAEFQERLQEDTSFGGNLGRAVFQAKKRVLEPFGLVEEGAKTAPGKKRPVEQSPQEPDSSSGIGKTGQQPAKKRLNFGQTGDSESVPDPQPLGEPPATPAAVGPTTMASGGGAPMADNNEGADGVGNASGNWHCDSTWLGDRVITTSTRTWALPTYNNHLYKQISSASTGASNDNHYFGYSTPWGYFDFNRFHCHFSPRDWQRLINNNWGFRPKRLNFKLFNIQVKEVTTNDGVTTIANNLTSTVQVFSDSEYQLPYVLGSAHQGCLPPFPADVFMIPQYGYLTLNNGSQAVGRSSFYCLEYFPSQMLRTGNNFTFSYTFEDVPFHSSYAHSQSLDRLMNPLIDQYLYYLNRTQNQSGSAQNKDLLFSRGSPAGMSVQPKNWLPGPCYRQQRVSKTKTDNNNSNFTWTGASKYNLNGRESIINPGTAMASHKDDKDKFFPMSGVMIFGKESAGASNTALDNVMITDEEEIKATNPVATERFGTVAVNLQSSSTDPATGDVHVMGALPGMVWQDRDVYLQGPIWAKIPHTDGHFHPSPLMGGFGLKHPPPQILIKNTPVPANPPAEFSATKFASFITQYSTGQVSVEIEWELQKENSKRWNPEVQYTSNYAKSANVDFTVDNNGLYTEPRPIGTRYLTRPL

SEQ ID NO: 5158 - DNA, 2211 bp, Artificial Sequence
  Description of Artificial Sequence: Synthetic polynucleotide
atggctgctgatggttatcttccagattggctcgaggacactctctctgaaggaataagacagtggtggaagctcaaacctggcccaccaccaccaaagcccgcagagcggcataaggacgacagcaggggtcttgtgcttcctgggtacaagtacctcggacccttcaacggactcgacaagggagagccggtcaacgaggcagacgcagcggccctcgagcacgacaaggcctacgaccagcagctcaaggccggtgacaacccctacctcaagtacaaccacgccgacgcggagttccagcagcggcttcagggcgacacatcgtttgggggcaacctcggcagagcagtcttccaggccaaaaagagggttcttgaacctcttggtctggttgagcaagcgggtgagacggctcctggaaagaagagaccgttgattgaatccccccagcagcccgactcctccacgggtatcggcaaaaaaggcaagcagccggctaaaaagagactcaattttggtcagactggcgactcagagtcagtccccgacccacaacctctcggagaacctccagcaacccccgctgctgtgggacctactacaatggcttcaggtggtggcgcaccaatggcagacaataacgaaggcgccgacggagtgggtaatgcctcaggaaattggcattgcgattccacatggctgggcgacagagtcatcaccaccagcacccgcacctgggccttgcccacctacaataaccacctctacaagcaaatctccagtgcttcaacgggggccagcaacgacaaccactacttcggctacagcaccccctgggggtattttgacttcaacagattccactgccacttttcaccacgtgactggcagcgactcatcaacaacaattggggattccggcccaagagactcaacttcaaactcttcaacatccaagtcaaggaggtcacgacgaatgatggcgtcacaaccatcgctaataaccttaccagcacggttcaagtcttctcggactcagactatcagctcccgtacgtgctcgggtcggctcacgagggctgcctcccgccgttcccagcagacgtcttcatggtgccacagtatggatacctcaccctgaacaacgggagtcaggcagtaggacgctcttcattttactgcctggagtactttccttctcagatgctgcgtaccggaaacaactttaccttcagctacacttttgaggacgttcctttccacagcagctacgctcacagccagagtctggaccgtctcatgaatcctctcatcgaccagtacctgtattacctgaacagaactcagaatcagtccggaagtgcccaaaacaaggacttgctgtttagccgggggtctccaactggcatgtctgttcagcccaaaaactggctacctggaccctgttatcggcagcagcgcgtttctaaaacaaaaacagacaacaacaacagcaactttacctggactggtgcttcaaaatataaccttaatgggcgtgaatctataatcaaccctggcactgctatggcctcacacaaagacgacaaagacaagttctttcccatgagcggtgtcatgatttttggaaaggagagcgccggagcttcaaacactgcattggacaatgtcatgatcacagacgaagaggaaatcaaagccactaaccccgtggccactgaaagatttgggactgtggcagtcaatctccagagcagcagcacagaccctgcgaccggagatgtgcatgccatgggagccttacctggaatggtgtggcaagacagagacgtatacctgcagggtcctatttgggccaaaattcctcacacggatggacactttcacccgtctcctctcatgggcggctttggactcaagaacccgcctcctcagatcctcatcaaaaacacgcctgttcctgcgaatcctccggcggagttttcagctacaaagtttgcttcattcatcacccagtattccacaggacaagtgagcgtggagattgaatgggagctgcagaaagaaaacagcaaacgctggaatcccgaagtgcagtatacatctaactatgcaaaatctgccaacgttgatttcactgtggacaacaatggactttatactgagcctcgccccattggcacccgttacctcacccgtcccctgtaa

SEQ ID NO: 5159 - protein, 736 aa, Artificial Sequence
  Description of Artificial Sequence: Synthetic polypeptide
MAADGYLPDWLEDTLSEGIRQWWKLKPGPPPPKPAERHKDDSRGLVLPGYKYLGPFNGLDKGEPVNEADAAALEHDKAYDQQLKAGDNPYLKYNHADAEFQQRLQGDTSFGGNLGRAVFQAKKRVLEPLGLVEQAGETAPGKKRPLIESPQQPDSSTGIGKKGKQPAKKRLNFGQTGDSESVPDPQPLGEPPATPAAVGPTTMASGGGAPMADNNEGADGVGNASGNWHCDSTWLGDRVITTSTRTWALPTYNNHLYKQISSASTGASNDNHYFGYSTPWGYFDFNRFHCHFSPRDWQRLINNNWGFRPKRLNFKLFNIQVKEVTTNDGVTTIANNLTSTVQVFSDSDYQLPYVLGSAHEGCLPPFPADVFMVPQYGYLTLNNGSQAVGRSSFYCLEYFPSQMLRTGNNFTFSYTFEDVPFHSSYAHSQSLDRLMNPLIDQYLYYLNRTQNQSGSAQNKDLLFSRGSPTGMSVQPKNWLPGPCYRQQRVSKTKTDNNNSNFTWTGASKYNLNGRESIINPGTAMASHKDDKDKFFPMSGVMIFGKESAGASNTALDNVMITDEEEIKATNPVATERFGTVAVNLQSSSTDPATGDVHAMGALPGMVWQDRDVYLQGPIWAKIPHTDGHFHPSPLMGGFGLKNPPPQILIKNTPVPANPPAEFSATKFASFITQYSTGQVSVEIEWELQKENSKRWNPEVQYTSNYAKSANVDFTVDNNGLYTEPRPIGTRYLTRPL

SEQ ID NO: 5160 - DNA, 2211 bp, Artificial Sequence
  Description of Artificial Sequence: Synthetic polynucleotide
atggctgccgatggttatcttccagattggctcgaggacaacctctctgagggcattcgcgagtggtgggcgctgaaacctggagccccgaagcccaaagccaaccagcaaaagcaggacgacggccggggtctggtgcttcctggctacaagtacctcggacccttcaacggactcgacaagggggagcccgtcaacgcggcggatgcagcggccctcgagcacgacaaggcctacgaccagcagctcaaagcgggtgacaatccgtacctgcggtataaccacgccgacgccgagtttcaggagcgtctgcaagaagatacgtcttttgggggcaacctcgggcgagcagtcttccaggccaagaagcgggttctcgaacctctcggtctggttgaggaaggcgctaagacggctcctggaaagaaacgtccggtagagcaatcgccacaagagccagactcctcctcgggcatcggcaagacaggccagcagcccgctaaaaagagactcaattttggtcagactggcgactcagagtcagtccccgacccacaacctctcggagaacctccagcaacccccgctgctgtgggacctactacaatggcttcaggcggtggcgcaccaatggcagacaataacgaaggcgccgacggagtgggtaatgcctcaggaaattggcattgcgattccacatggctgggcgacagagtcatcaccaccagcacccgaacatgggccttgcccacctataacaaccacctctacaagcaaatctccagtgcttcgacgggggccagcaacgacaaccactacttcggctacagcaccccctgggggtattttgactttaacagattccactgccacttttcaccacgtgactggcagcgactcatcaacaacaactggggattccggcccaagagactcagcttcaagctcttcaacatccaggtcaaggaggtcacgacgaatgatggcgtcacaaccatcgctaataaccttaccagcacggttcaagtcttctcggactcggagtaccagcttccgtacgtcctcggctctgcgcaccagggctgcctccctccgttcccggcggacgtgttcatgattccgcaatacggctacctgacgctcaacaatggcagccaagccgtgggacgttcatccttttactgcctggaatatttcccttctcagatgctgagaacgggcaacaactttaccttcagctacacctttgaggaagtgcctttccacagcagctacgcgcacagccagagcctggaccggctgatgaatcctctcatcgatcaatacctgtattacctgaacagaactcaaaatcagtccggaagtgcccaaaacaaggacttgctgtttagccgtgggtctccagctggcatgtctgttcagcccaaaaactggctacctggaccctgttatcggcagcagcgcgtttctaaaacaaaaacagacaacaacaacagcaattttacctggactggtgcttcaaaatataacctcaatgggcgtgaatccatcatcaaccctggcactgctatggcctcacataaagacgacgaagacaagttctttcccatgagcggtgtcatgatttttggaaaagagagcgccggagcttcaaacactgcattggacaatgtcatgattacagacgaagaggaaattaaagccactaaccctgtggccaccgaaagatttgggaccgtggcagtcaatttccagagcagcagcacagaccctgcgaccggagatgtgcatgctatgggagcattacctggcatggtgtggcaagatagagacgtgtacctgcagggtcccatttgggccaaaattcctcacacagatggacactttcacccgtctcctcttatgggcggctttggactcaagaacccgcctcctcagatcctcatcaaaaacacgcctgttcctgcgaatcctccggcggagttttcagctacaaagtttgcttcattcatcacccaatactccacaggacaagtgagcgtggagattgaatgggagctgcagaaagaaaacagcaaacgctggaatcccgaagtgcagtatacatctaactatgcaaaatctgccaacattgatttcactgtggacaacaatggactttatactgagcctcgccccattggcacccgttacctcacccgtccccagtaa

SEQ ID NO: 5161 - protein, 736 aa, Artificial Sequence
  Description of Artificial Sequence: Synthetic polypeptide
MAADGYLPDWLEDNLSEGIREWWALKPGAPKPKANQQKQDDGRGLVLPGYKYLGPFNGLDKGEPVNAADAAALEHDKAYDQQLKAGDNPYLRYNHADAEFQERLQEDTSFGGNLGRAVFQAKKRVLEPLGLVEEGAKTAPGKKRPVEQSPQEPDSSSGIGKTGQQPAKKRLNFGQTGDSESVPDPQPLGEPPATPAAVGPTTMASGGGAPMADNNEGADGVGNASGNWHCDSTWLGDRVITTSTRTWALPTYNNHLYKQISSASTGASNDNHYFGYSTPWGYFDFNRFHCHFSPRDWQRLINNNWGFRPKRLSFKLFNIQVKEVTTNDGVTTIANNLTSTVQVFSDSEYQLPYVLGSAHQGCLPPFPADVFMIPQYGYLTLNNGSQAVGRSSFYCLEYFPSQMLRTGNNFTFSYTFEEVPFHSSYAHSQSLDRLMNPLIDQYLYYLNRTQNQSGSAQNKDLLFSRGSPAGMSVQPKNWLPGPCYRQQRVSKTKTDNNNSNFTWTGASKYNLNGRESIINPGTAMASHKDDEDKFFPMSGVMIFGKESAGASNTALDNVMITDEEEIKATNPVATERFGTVAVNFQSSSTDPATGDVHAMGALPGMVWQDRDVYLQGPIWAKIPHTDGHFHPSPLMGGFGLKNPPPQILIKNTPVPANPPAEFSATKFASFITQYSTGQVSVEIEWELQKENSKRWNPEVQYTSNYAKSANIDFTVDNNGLYTEPRPIGTRYLTRPQ

SEQ ID NO: 5162 - DNA, 2211 bp, Artificial Sequence
  Description of Artificial Sequence: Synthetic polynucleotide
atggctgccgatggttatcttccagattggctcgaggacaacctctctgagggcattcgcgagtggtgggacttgaaacctggagccccgaaacccaaagccaaccagcaaaagcaggacgacggccggggtctggtgcttcctggctacaagtacctcggacccttcaacggactcgacaagggggagcccgtcaacgcggcggatgcagcggccctcgagcacgacaaggcctacgaccagcagctcaaagcgggtgacaatccgtaccttcggtataaccacgccgacgccgagtttcaggagcgtctgcaagaagatacgtcttttgggggcaacctcgggcgagcagtcttccaggccaaaaagagggttctcgaacctctcggtctggttgaggaagcggctaagacggctcctggaaagaaacgtccggtagagcagtcgccacaagagccagactcctcctcgggcattggcaagacaggccagcagcccgctaaaaagagactcaattttggtcagactggcgactcagagtcagtccccgacccacaacctctcggagaacctcccgcagccccctcaggtgtgggatctcttacaatggcttcaggtggtggcgcaccaatggcagacaataacgaaggcgccgacggagtgggtaatgcctcaggaaattggcattgcgattccacatggctgggcgacagagtcatcaccaccagcacccgcacctgggccttgcccacctacaataaccacctctacaagcaaatctccagtgcttcaacgggggccagcaacgacaaccactacttcggctacagcaccccctgggggtattttgacttcaacagattccactgccacttttcaccacgtgactggcaaagactcatcaacaacaattggggattccggcccaagagactcaacttcaagctcttcaacatccaagtcaaggaggtcacgacgaatgatggcgtcacgaccatcgctaataaccttaccagcacggttcaagtcttctcggactcggagtaccagttgccgtacgtcctcggctctgcgcaccagggctgcctccctccgttcccggcggacgtgttcatgattccgcagtacggctacctaacgctcaacaatggcagccaggcagtgggacggtcatccttttactgcctggaatatttcccatcgcagatgctgagaacgggcaacaactttaccttcagctacacctttgaggaagtgcctttccacagcagctacgcgcacagccagagcctggaccggctgatgaatcctctcatcgaccagtacctgtattacctgaacagaactcaaaatcagtccggaagtgcccaaaacaaggacttgctgtttagccgtgggtctccagctggcatgtctgttcagcccaaaaactggctacctggaccctgttaccggcagcagtgcgtttctaaaacaaaaacagacaacaacaacagcaactttacctggactggtgcttcaaaatataaccttaatgggcgtgaatctataatcaaccctggcactgctatggcctcacacaaagacgacaaagacaagttctttcccatgagcggtgtcatgatttttggaaaggagagcgccggagcttcaaacactgcattggacaatgtcatgatcacagacgaagaggaaatcaaagccactaaccccgtggccaccgaaagatttgggactgtggcagtcaatctccagagcagcagcacagaccctgcgaccggagatgtgcatgttatgggagccttacctggaatggtgtggcaagacagagacgtatacctgcagggtcctatttgggccaaaattcctcacacagatggacactttcacccgtctcctcttatgggcggctttggactcaagaacccgcctcctcagatcctcatcaaaaacacgcctgttcctgcgaatcctccggcggagttttcagctacaaagtttgcttcattcatcacccaatactccacaggacaagtgagcgtggagattgaatgggagctgcagaaagaaaacagcaagcgctggaatcccgaagtgcagtacacatccaattatgcaaaatctgccaacgttgatttcactgtggacaacaatggactttatactgagcctcgccccattggcacccgttacctcacccgtcccctgtaa

SEQ ID NO: 5163 - protein, 736 aa, Artificial Sequence
  Description of Artificial Sequence: Synthetic polypeptide
MAADGYLPDWLEDNLSEGIREWWDLKPGAPKPKANQQKQDDGRGLVLPGYKYLGPFNGLDKGEPVNAADAAALEHDKAYDQQLKAGDNPYLRYNHADAEFQERLQEDTSFGGNLGRAVFQAKKRVLEPLGLVEEAAKTAPGKKRPVEQSPQEPDSSSGIGKTGQQPAKKRLNFGQTGDSESVPDPQPLGEPPAAPSGVGSLTMASGGGAPMADNNEGADGVGNASGNWHCDSTWLGDRVITTSTRTWALPTYNNHLYKQISSASTGASNDNHYFGYSTPWGYFDFNRFHCHFSPRDWQRLINNNWGFRPKRLNFKLFNIQVKEVTTNDGVTTIANNLTSTVQVFSDSEYQLPYVLGSAHQGCLPPFPADVFMIPQYGYLTLNNGSQAVGRSSFYCLEYFPSQMLRTGNNFTFSYTFEEVPFHSSYAHSQSLDRLMNPLIDQYLYYLNRTQNQSGSAQNKDLLFSRGSPAGMSVQPKNWLPGPCYRQQCVSKTKTDNNNSNFTWTGASKYNLNGRESIINPGTAMASHKDDKDKFFPMSGVMIFGKESAGASNTALDNVMITDEEEIKATNPVATERFGTVAVNLQSSSTDPATGDVHVMGALPGMVWQDRDVYLQGPIWAKIPHTDGHFHPSPLMGGFGLKNPPPQILIKNTPVPANPPAEFSATKFASFITQYSTGQVSVEIEWELQKENSKRWNPEVQYTSNYAKSANVDFTVDNNGLYTEPRPIGTRYLTRPL

SEQ ID NO: 5164 - DNA, 2211 bp, Artificial Sequence
  Description of Artificial Sequence: Synthetic polynucleotide
atggctgccgatggttatcttccagattggctcgaggacaacctctctgagggcattcgcgaatggtgggacttgaaacctggagccccgaaacccaaagtcaaccagcaaaagcaggacaacgctcggggtcttgtgcttccgggttacaaatacctcggacccttcaacggactcgacaagggggagcccgtcaacgcggcggacgcagcggccctcgagcacgacaaggcctacgaccagcagctcaaagcgggtgacaatccgtaccttcggtataaccacgccgacgccgagtttcaggagcgtctgcaagaagatacgtcttttgggggcaaccttggacgagcagtcttccaggccaagaagagggttctcgaaccttttggtctggttgaggaaggtgctaagacggctcctggaaagaaacgtccggtagagcagtcgccacaagagccagactcctcctcgggcattggcaagacaggccagcagcccgctaaaaagagactcaattttggtcagactggcgactcagagtcagtccccgacccacaacctctcggagaacctccagcaacccccgctgctgtgggacctactacaatggcttcaggcggtggcgcaccaatggcagacaataacgaaggcgccgacggagtgggtaatgcctcaggaaattggcattgcgattccacatggctgggcgacagagtcatcaccaccagcacccgcacctgggccttgcccacctacaataaccacctctacaagcaaatctccagtgcttcaacgggggccagcaacgacaaccactacttcggctacagcaccccctgggggtattttgacttcaacagattccactgccacttttcaccacgtgactggcaaagactcatcaacaacaattggggattccggcccaagagactcaacttcaagctcttcaacatccaagtcaaggaggtcacgacgaatgatggcgtcacgaccatcgctaataaccttaccagcacggttcaagtcttctcggactcggagtaccagttgccgtacgtcctcggctctgcgcaccagggctgcctccctccgttcccggcggacgtgttcatgattccgcaatacggctacctgacgctcaacaatggcagccaggcagtgggacggtcatccttttactgcctggaatatttcccatcgcagatgctgagaacgggcaataactttaccttcagctacacttttgaggacgttcctttccacagcagctacgctcacagccagagcctggaccggctgatgaatcctctcatcgaccagtacctgtattacctgaacagaactcagaatcagtccggaagtgcccaaaacaaggacttgctgtttagccgtgggtctccaactggcatgtctgttcagcccaaaaactggctacctggaccctgttatcggcagcagcgcgtttctaaaacaaaaacagacaacaacaacagcaactttacctggactggtgcttcaaaatataaccttaatgggcgtgaatctataatcaaccctggcactgctatggcctcacacaaagacgacgaagacaagttctttcccatgagcggtgtcatgatttttggaaaggagagcgccggagcttcaaacactgcattggacaatgtcatgatcacagacgaagaggaaatcaaagccactaaccccgtggccactgaaagatttgggactgtggcagtcaatctccagagcagcagcacagaccctgcgaccggagatgtgcatgccatgggagccttacctggaatggtgtggcaagacagagacgtatacctgcagggtcctatttgggccaaaattcctcacacggatggacactttcacccgtctcctctcatgggcggctttggacttaagcacccgcctcctcagatcctcatcaaaaacacgcctgttcctgcgaatcctccggcagagttttcggctacaaagtttgcttcattcatcacccagtattccacaggacaagtgagcgtggagattgaatgggagctgcagaaagaaaacagcaaacgctggaatcccgaagtgcagtatacatctaactatgcaaaatctgccaacgttgatttcactgtggacaacaatggactttatactgagcctcgccccattggcacccgttacctcacccgtcccctgtaa

SEQ ID NO: 5165 - protein, 736 aa, Artificial Sequence
  Description of Artificial Sequence: Synthetic polypeptide
MAADGYLPDWLEDNLSEGIREWWDLKPGAPKPKVNQQKQDNARGLVLPGYKYLGPFNGLDKGEPVNAADAAALEHDKAYDQQLKAGDNPYLRYNHADAEFQERLQEDTSFGGNLGRAVFQAKKRVLEPFGLVEEGAKTAPGKKRPVEQSPQEPDSSSGIGKTGQQPAKKRLNFGQTGDSESVPDPQPLGEPPATPAAVGPTTMASGGGAPMADNNEGADGVGNASGNWHCDSTWLGDRVITTSTRTWALPTYNNHLYKQISSASTGASNDNHYFGYSTPWGYFDFNRFHCHFSPRDWQRLINNNWGFRPKRLNFKLFNIQVKEVTTNDGVTTIANNLTSTVQVFSDSEYQLPYVLGSAHQGCLPPFPADVFMIPQYGYLTLNNGSQAVGRSSFYCLEYFPSQMLRTGNNFTFSYTFEDVPFHSSYAHSQSLDRLMNPLIDQYLYYLNRTQNQSGSAQNKDLLFSRGSPTGMSVQPKNWLPGPCYRQQRVSKTKTDNNNSNFTWTGASKYNLNGRESIINPGTAMASHKDDEDKFFPMSGVMIFGKESAGASNTALDNVMITDEEEIKATNPVATERFGTVAVNLQSSSTDPATGDVHAMGALPGMVWQDRDVYLQGPIWAKIPHTDGHFHPSPLMGGFGLKHPPPQILIKNTPVPANPPAEFSATKFASFITQYSTGQVSVEIEWELQKENSKRWNPEVQYTSNYAKSANVDFTVDNNGLYTEPRPIGTRYLTRPL

SEQ ID NO: 5166 - DNA, 2208 bp, Artificial Sequence
  Description of Artificial Sequence: Synthetic polynucleotide
  modified_base (955)..(955): n is a, c, t or g
  misc_feature (955)..(955): n is a, c, g, or t
  modified_base (971)..(972): n is a, c, t or g
  misc_feature (971)..(972): n is a, c, g, or t
  modified_base (981)..(981): n is a, c, t or g
  misc_feature (981)..(981): n is a, c, g, or t
  modified_base (986)..(986): n is a, c, t or g
  misc_feature (986)..(986): n is a, c, g, or t
  modified_base (1235)..(1235): n is a, c, t or g
  misc_feature (1235)..(1235): n is a, c, g, or t
  modified_base (1694)..(1696): n is a, c, t or g
  misc_feature (1694)..(1696): n is a, c, g, or t
  modified_base (1698)..(1698): n is a, c, t or g
  misc_feature (1698)..(1698): n is a, c, g, or t
  modified_base (1763)..(1765): n is a, c, t or g
  misc_feature (1763)..(1765): n is a, c, g, or t
  modified_base (1778)..(1778): n is a, c, t or g
  misc_feature (1778)..(1778): n is a, c, g, or t
  modified_base (2204)..(2204): n is a, c, t or g
  misc_feature (2204)..(2204): n is a, c, g, or t
atggctgccgatggttatcttccagattggctcgaggacaacctctctgagggcattcgcgaatggtgggacttgaaacctggagccccgaaacccaaagtcaaccagcaaaagcaggacaacgctcggggtcttgtgcttccgggttacaaatacctcggacccttcaacggactcgacaagggggagcccgtcaacgcggcggacgcagcggccctcgagcacgacaaggcctacgaccagcagctcaaagcgggtgacaatccgtaccttcggtataaccacgccgacgccgagtttcaggagcgtctgcaagaagatacgtcttttgggggcaaccttggacgagcagtcttccaggccaagaagagggttctcgaaccttttggtctggttgaggaaggtgctaagacggctcctggaaagaaacgtccggtagagcagtcgccacaagagccagactcctcctcgggcattggcaagacaggccagcagcccgctaaaaagagactcaattttggtcagactggcgactcagagtcagtccccgacccacaacctctcggagaacctccagcaacccccgctgctgtgggacctactacaatggcttcaggcggtggcgcaccaatggcagacaataacgaaggcgccgacggagtgggtaatgcctcaggaaattggcattgcgattccacatggctgggcgacagagtcatcaccaccagcacccgaacatgggccttgcccacctataacaaccacctctacaagcaaatctccagtgcttcaacgggggccagcaacgacaaccactacttcggctacagcaccccctgggggtattttgatttcaacagattccactgccacttttcaccacgtgactggcagcgactcatcaataacaattggggattccggcccaagagactcaacttcaaactcttcaacntccaagtcaaggaggnnacgacgaangatgncgtcacaaccatcgctaataaccttaccagcacggttcaagtcttctcggactcggagtaccagcttccgtacgtcctcggctctgcgcaccagggctgcctccctccgttcccggcggacgtgttcatgattccgcaatacggctacctgacgctcaacaatggcagccaggcagtgggacggtcatccttttactgcctggaatatttcccatcgcagatgctgagaacgggcaataactttacctncagctacacttttgaggacgttcctttccacagcagctacgctcacagccagagcctggaccggctgatgaatcctctcatcgaccagtacctgtattacctgaacagaactcagaatcagtccggaagtgcccaaaacaaggacttgctgtttagccgtgggtctccaactggcatgtctgttcagcccaaaaactggctacctggaccctgttatcggcagcagcgcgtttctaaaacaaaaacagacaacaacaacagcaactttacctggactggtgcttcaaaatataaccttaatgggcgtgaatctataatcaaccctggcactgctatggcctcacacaaagacgacgaagacaagttctttcccatgagcggtgtcatgatttttggaaaggagagcgccggagcttcaaacactgcattggacaatgtcatgatcacagacgaagagannncnaagccactaaccccgtggccactgaaagatttgggactgtggcagtcaatctccaagcagcacannnaccctgcgaccgnagatgtgcatgccatgggagccttacctggaatggtgtggcaagacagagacgtatacctgcagggtcctatttgggccaaaattcctcacacggatggacactttcacccgtctcctctcatgggcggctttggacttaagcacccgcctcctcagatcctcatcaaaaacacgcctgttcctgcgaatcctccggcagagttttcggctacaaagtttgcttcattcatcacccagtattccacaggacaagtgagcgtggagattgaatgggagctgcagaaagaaaacagcaaacgctggaatcccgaagtgcagtatacatctaactatgcaaaatctgccaacgttgatttcactgtggacaacaatggactttatactgagcctcgccccattggcacccgttacctcacccgtccccngtaa

SEQ ID NO: 5167 - protein, 723 aa, Artificial Sequence
  Description of Artificial Sequence: Synthetic polypeptide
MAADGYLPDWLEDNLSEGIREWWDLKPGAPKPKVNQQKQDNARGLVLPGYKYLGPFNGLDKGEPVNAADAAALEHDKAYDQQLKAGDNPYLRYNHADAEFQERLQEDTSFGGNLGRAVFQAKKRVLEPFGLVEEGAKTAPGKKRPVEQSPQEPDSSSGIGKTGQQPAKKRLNFGQTGDSESVPDPQPLGEPPATPAAVGPTTMASGGGAPMADNNEGADGVGNASGNWHCDSTWLGDRVITTSTRTWALPTYNNHLYKQISSASTGASNDNHYFGYSTPWGYFDFNRFHCHFSPRDWQRLINNNWGFRPKRLNFKLFNQVKETTDVTTIANNLTSTVQVFSDSEYQLPYVLGSAHQGCLPPFPADVFMIPQYGYLTLNNGSQAVGRSSFYCLEYFPSQMLRTGNNFTSYTFEDVPFHSSYAHSQSLDRLMNPLIDQYLYYLNRTQNQSGSAQNKDLLFSRGSPTGMSVQPKNWLPGPCYRQQRVSKTKTDNNNSNFTWTGASKYNLNGRESIINPGTAMASHKDDEDKFFPMSGVMIFGKESAGASNTALDNVMITDEEATNPVATERFGTVAVNLQSSPATDVHAMGALPGMVWQDRDVYLQGPIWAKIPHTDGHFHPSPLMGGFGLKHPPPQILIKNTPVPANPPAEFSATKFASFITQYSTGQVSVEIEWELQKENSKRWNPEVQYTSNYAKSANVDFTVDNNGLYTEPRPIGTRYLTRP

SEQ ID NO: 5168 - DNA, 2208 bp, Artificial Sequence
  Description of Artificial Sequence: Synthetic polynucleotide
atggctgccgatggttatcttccagattggctcgaggacactctctctgaaggaataagacagtggtggaagctcaaacctggcccaccaccaccaaagcccgcagagcggcataaggacgacagcaggggtcttgtgcttcctgggtacaagtacctcggacccttcaacggactcgacaagggagagccggtcaacgaggcagacgccgcggccctcgagcacgacaaagcctatgaccggcagctcgacagcggagacaacccgtacctcaagtacaaccacgccgacgcggagtttcaggagcgccttaaagaagatacgtcttttgggggcaacctcggacgagcagtcttccaggcgaaaaagagggttcttgaacctctgggcctggttgaggaacctgttaagacggctccgggaaaaaagaggccggtagagcactctcctgtggagccagactcctcctcgggaaccggaaaggcgggtcagcagcctgcaagaaaaagattgaattttggtcagactggagacgcagactcagtacctgacccccagcctctcggacagccaccagcagccccctctggtctgggaactaatacgatggctacaggcagtggcgcaccaatggcagacaataacgagggcgccgacggagtgggtaattcctcgggaaattggcattgcgattccacatggatgggcgacagagtcatcaccaccagcacccgaacctgggccctgcccacctacaacaaccacctctacaaacaaatttccagccaatcaggagcctcgaacgacaatcactactttggctacagcaccccttgggggtattttgacttcaacagattccactgccacttttcaccacgtgactggcaaagactcatcaacaacaactggggattccgacccaagagactcaagttcaagctctttaacattcaagtcaaagaggtcacgcagaatgacggtacgacgacgattgccaataaccttaccagcacggttcaggtgtttactgactcggagtaccagctcccgtacgtcctcggctcggcgcatcaaggatgcctcccgccgttcccagcagacgtcttcatggtgccacagtatggatacctcaccctgaacaacgggagtcaggcagtaggacgctcttcattttactgcctggagtactttccttctcagatgctgcgtaccggtaacaactttaccttcagctacacttttgaggacgttcctttccacagcagctacgctcacagccagagtctggaccgtctcatgaatcctctcatcgaccagtacctgtattacttgagcagaacagacgctccaagtggaaccaccacgcagtcaaggcttcagttttctcaggccggagcgagtgacattcgggaccagtctaggaactggcttcctggaccctgttaccgccagcagcgagtatcaaagacatctgcggataacaacaacagtgaatactcgtggactggagctaccaagtaccacctcaatggcagagactctctggtgaatccgggcccggccatggcaagccacaaggacgatgaagaaaagttttttcctcagagcggggttctcatctttgggaagcaaggctcagagaaaacaagtgtggacattgaaaaggtcatgattacagacgaagaggaaatcaggacaaccaatcccgtggctacggagcagtatggttctgtatctaccaacctccagagaggcaacagacaagcagctaccgcagatgtcaacacacaaggcgttcttccaggcatggtctggcaggacagagatgtgtaccttcaggggcccatctgggcaaagattccacacacggacggacattttcacccctctcccctcatgggtggattcggacttaaacaccctcctccacagattctcatcaagaacaccccggtacctgcgaatccttcgaccaccttcagtgcggcaaagtttgcttccttcatcacacagtactccacgggacaggtcagcgtggagatcgagtgggagctgcagaaggaaaacagcaaacgctggaatcccgaagttcagtacacttccaactacaacaagtctgttaatgtggactttactgtggacactaatggcgtgtattcagagcctcgccccattggcaccagatacctgactcgtaatctgtaa

SEQ ID NO: 5169 - protein, 735 aa, Artificial Sequence
  Description of Artificial Sequence: Synthetic polypeptide
MAADGYLPDWLEDTLSEGIRQWWKLKPGPPPPKPAERHKDDSRGLVLPGYKYLGPFNGLDKGEPVNEADAAALEHDKAYDRQLDSGDNPYLKYNHADAEFQERLKEDTSFGGNLGRAVFQAKKRVLEPLGLVEEPVKTAPGKKRPVEHSPVEPDSSSGTGKAGQQPARKRLNFGQTGDADSVPDPQPLGQPPAAPSGLGTNTMATGSGAPMADNNEGADGVGNSSGNWHCDSTWMGDRVITTSTRTWALPTYNNHLYKQISSQSGASNDNHYFGYSTPWGYFDFNRFHCHFSPRDWQRLINNNWGFRPKRLKFKLFNIQVKEVTQNDGTTTIANNLTSTVQVFTDSEYQLPYVLGSAHQGCLPPFPADVFMVPQYGYLTLNNGSQAVGRSSFYCLEYFPSQMLRTGNNFTFSYTFEDVPFHSSYAHSQSLDRLMNPLIDQYLYYLSRTDAPSGTTTQSRLQFSQAGASDIRDQSRNWLPGPCYRQQRVSKTSADNNNSEYSWTGATKYHLNGRDSLVNPGPAMASHKDDEEKFFPQSGVLIFGKQGSEKTSVDIEKVMITDEEEIRTTNPVATEQYGSVSTNLQRGNRQAATADVNTQGVLPGMVWQDRDVYLQGPIWAKIPHTDGHFHPSPLMGGFGLKHPPPQILIKNTPVPANPSTTFSAAKFASFITQYSTGQVSVEIEWELQKENSKRWNPEVQYTSNYNKSVNVDFTVDTNGVYSEPRPIGTRYLTRNL

SEQ ID NO: 5170 - DNA, 2208 bp, Artificial Sequence
  Description of Artificial Sequence: Synthetic polynucleotide
atggctgccgatggttatcttccagattggctcgaggacactctctctgaaggaataagacagtggtggaagctcaaacctggcccaccaccaccaaagcccgcagagcggcataaggacgacagcaggggtcttgtgcttcctgggtacaagtacctcggacccttcaacggactcgacaagggagagccggtcaacgaggcagacgccgcggccctcgagcacgacaaagcctatgaccggcagctcgacagcggagacaacccgtacctcaagtacaaccacgccgacgcggagtttcaggagcgccttaaagaagatacgtcttttgggggcaacctcggacgagcagtcttccaggcgaaaaagagggttcttgaacctctgggcctggttgaggaacctgttaagacggctccgggaaaaaagaggccggtagagcactctcctgtggagccagactcctcctcgggaaccggaaaggcgggccagcagcctgcaagaaaaagattgaattttggtcagactggagacgcaaactcagtacctgacccccagcctctcggacagccaccagcagccccctctggtctgggaactaatacgatggctacaggcagtggcgcaccaatggcagacaataacgagggcgccgacggagtgggtaattcctcgggaaattggcattgcgattccacatggatgggcgacagagtcatcaccaccagcacccgaacctgggccctgcccacctacaacaaccacctctacaaacaaatttccagccaatcaggagcctcgaacgacaatcactactttggctacagcaccccttgggggtattttgacttcaacagattccactgccacttttcaccacgtgactggcaaagactcatcaacaacaactggggattccgacccaagagactcaagttcaagctctttaacattcaagtcaaagaggtcacgcagaatgacggtacgacgacgattgccaataaccttaccagcacggttcaggtgtttactgactcggagtaccagctcccgtacgtcctcggctcggcgcatcaaggatgcctcccgccgttcccagcagacgtcttcatggtgccacagtatggatacctcaccctgaacaacgggagtcgggcagtaggacgctcttcattttactgcctggagtactttccttctcagatgctgcgtaccggtaacaactttaccttcagctacacttttgaggacgttcctttccacagcagctacgctcacagccagagtctggaccgtctcatgaatcctctcatcgaccagtacctgtattacttgagcagaacagacactccaagtggaaccaccacgcagtcaaggcttcagttttctcaggccggagcgagtgacattcgggaccagtctaggaactggcttcctggaccctgttaccgccagcagcgagtatcaaagacatctgcggataacaacaacagtgaatactcgtggactggagctaccaagtaccacctcaatggcagagactctctggtgaatccgggcccggccatggcaagccacaaggacgatgaagaaaagttttttcctcagagcggggttctcatctttgggaagcaaggctcagagaaaacaagtgtggacattgaaaaggtcatgattacagacgaagaggaaatcaggacgaccaatcccgtggctacggagcagtatggttctgtatctaccaacctccagagaggcaacagacaagcagctaccgcagatgtcaacacacaaggcgttcttccaggcatggtctggcaggacagagatgtgtaccttcaggggcccatctgggcaaagattccacacacggacggacattttcacccctctcccctcatgggtggattcggacttaaacaccctcctccacagattctcatcaagaacaccccggtacctgcgaatccttcgaccaccttcagtgcggcaaagtttgcttccttcatcacacagtactccacgggacaggtcagcgtggagatcgagtgggagctgcagaaggaaaacagcaaacgctggaatcccgaagttcagtacacttccaactacaacaagtctgttaatgtggactttactgtggacactaatggcgtgtatacagagcctcgccccattggcaccagatacctgactcgtaatctgtaa

SEQ ID NO: 5171 - protein, 735 aa, Artificial Sequence
  Description of Artificial Sequence: Synthetic polypeptide
MAADGYLPDWLEDTLSEGIRQWWKLKPGPPPPKPAERHKDDSRGLVLPGYKYLGPFNGLDKGEPVNEADAAALEHDKAYDRQLDSGDNPYLKYNHADAEFQERLKEDTSFGGNLGRAVFQAKKRVLEPLGLVEEPVKTAPGKKRPVEHSPVEPDSSSGTGKAGQQPARKRLNFGQTGDANSVPDPQPLGQPPAAPSGLGTNTMATGSGAPMADNNEGADGVGNSSGNWHCDSTWMGDRVITTSTRTWALPTYNNHLYKQISSQSGASNDNHYFGYSTPWGYFDFNRFHCHFSPRDWQRLINNNWGFRPKRLKFKLFNIQVKEVTQNDGTTTIANNLTSTVQVFTDSEYQLPYVLGSAHQGCLPPFPADVFMVPQYGYLTLNNGSRAVGRSSFYCLEYFPSQMLRTGNNFTFSYTFEDVPFHSSYAHSQSLDRLMNPLIDQYLYYLSRTDTPSGTTTQSRLQFSQAGASDIRDQSRNWLPGPCYRQQRVSKTSADNNNSEYSWTGATKYHLNGRDSLVNPGPAMASHKDDEEKFFPQSGVLIFGKQGSEKTSVDIEKVMITDEEEIRTTNPVATEQYGSVSTNLQRGNRQAATADVNTQGVLPGMVWQDRDVYLQGPIWAKIPHTDGHFHPSPLMGGFGLKHPPPQILIKNTPVPANPSTTFSAAKFASFITQYSTGQVSVEIEWELQKENSKRWNPEVQYTSNYNKSVNVDFTVDTNGVYTEPRPIGTRYLTRNL

SEQ ID NO: 5172 - DNA, 2211 bp, Artificial Sequence
  Description of Artificial Sequence: Synthetic polynucleotide
atggctgccgatggttatcttccagattggctcgaggacactctctctgaaggaataagacagtggtggaagctcaaacctggcccaccaccaccaaagcccgcagagcggcataaggacgacagcaggggtcttgtgcttcctgggtacaagtacctcggacccttcaacggactcgacaagggagagccggtcaacgaggcagacgccgcggccctcgagcacgacaaggcctacgaccagcagctcaaagcgggtgacaatccgtacctgcggtataaccacgccgacgccgagtttcaggagcgtctgcaagaagatacgtcttttgggggcaacctcgggcgagcagtcttccaggccaagaagcgggttctcgaacctctcggtctggttgaggaaggcgctaagacggctcctggaaagaaacgtccggtagagcagtcgccacaagagccagactcctcctcgggcatcggcaagacaggccagcagcccgctaaaaagagactcaattttggtcagactggcgactcagagtcagtccccgacccacaacctctcggagaacctccagcaacccccgctgctgtgggacctactacaatggcttcaggcggtggcgcaccaatggcagacaataacgaaggcgccgacggagtgggtaatgcctcaggaaattggcattgcgattccacatggctgggcgacagagtcatcaccaccagcacccgaacatgggccttgcccacctataacaaccacctctacaagcaaatctccagtgcttcgacgggggccagcaacgacaaccactacttcggctacagcaccccctgggggtattttgactttaacagattccactgccacttttcaccacgtgactggcagcgactcatcaacaataactggggattccggcccaagagactcagcttcaagctcttcaacatccaggtcaaggaggtcacgacgaatgatggcgtcacaaccatcgctaataaccttaccagcacggttcaagtcttctcggactcggagtaccagcttccgtacgtcctcggctctgcgcaccagggctgcctccctccgttcccggcggacgtgttcatgattccgcaatacggctacctgacgctcaacaatggcagccaagccgtgggacgttcatccttttactgcctggaatatttcccttctcagatgctgagaacgggcaacaactttaccttcagctacacctttgaggaagtgcctttccacagcagctacgcgcacagccagagcctggaccggctgatgaatcctctcatcgatcaatacctgtattacctgaacagaactcaaaatcagtccggaagtgcccaaaacaaggacttgctgtttagccgtgggtctccagctggcatgtctgttcagcccaaaaactggctacctggaccctgttatcggcagcagcgcgtttctaaaacaaaaacagacaacaacaacagcaattttacctggactggtgcttcaaaatataacctcaatgggcgtgaatccatcatcaaccctggcactgctatggcctcacacaaagacgacgaagacaagttctttcccatgagcggtgtcatgatttttggaaaagagagcgccggagcttcaaacactgcattggacaatgtcatgattacggacgaagaggaaattaaagccactaaccctgtggccaccgaaagatttgggaccgtggcagtcaatttccagagcagcagcacagaccctgcgaccggagatgtgcatgctatgggagcattacctggcatggtgtggcaagatagagacgtgtacctgcagggtcccatttgggccaaaattcctcacacagatggacactttcacccgtctcctcttatgggcggctttggactcaagaacccgcctcctcagatcctcatcaaaaacacgcctgttcctgcgaatcctccggcggagttttcagctacaaagtttgcttcattcatcactcaatactccacaggacaagtgagcgtggaaattgaatgggagctgcagaaagaaaacagcaaacgctggaatcccgaagtgcagtatacatctaactatgcaaaatctgccaacgttgatttcactgtggacaacaatggactttatactgagcctcgccccattggcacccgttacctcacccgtcccctgtaa

SEQ ID NO: 5173 - protein, 736 aa, Artificial Sequence
  Description of Artificial Sequence: Synthetic polypeptide
MAADGYLPDWLEDTLSEGIRQWWKLKPGPPPPKPAERHKDDSRGLVLPGYKYLGPFNGLDKGEPVNEADAAALEHDKAYDQQLKAGDNPYLRYNHADAEFQERLQEDTSFGGNLGRAVFQAKKRVLEPLGLVEEGAKTAPGKKRPVEQSPQEPDSSSGIGKTGQQPAKKRLNFGQTGDSESVPDPQPLGEPPATPAAVGPTTMASGGGAPMADNNEGADGVGNASGNWHCDSTWLGDRVITTSTRTWALPTYNNHLYKQISSASTGASNDNHYFGYSTPWGYFDFNRFHCHFSPRDWQRLINNNWGFRPKRLSFKLFNIQVKEVTTNDGVTTIANNLTSTVQVFSDSEYQLPYVLGSAHQGCLPPFPADVFMIPQYGYLTLNNGSQAVGRSSFYCLEYFPSQMLRTGNNFTFSYTFEEVPFHSSYAHSQSLDRLMNPLIDQYLYYLNRTQNQSGSAQNKDLLFSRGSPAGMSVQPKNWLPGPCYRQQRVSKTKTDNNNSNFTWTGASKYNLNGRESIINPGTAMASHKDDEDKFFPMSGVMIFGKESAGASNTALDNVMITDEEEIKATNPVATERFGTVAVNFQSSSTDPATGDVHAMGALPGMVWQDRDVYLQGPIWAKIPHTDGHFHPSPLMGGFGLKNPPPQILIKNTPVPANPPAEFSATKFASFITQYSTGQVSVEIEWELQKENSKRWNPEVQYTSNYAKSANVDFTVDNNGLYTEPRPIGTRYLTRPL

SEQ ID NO: 5174 - protein, 735 aa, Artificial Sequence
  Description of Artificial Sequence: Synthetic polypeptide
MAADGYLPDWLEDTLSEGIRQWWKLKPGPPPPKPAERHKDDSRGLVLPGYKYLGPFNGLDKGEPVNEADAAALEHDKAYDRQLDSGDNPYLKYNHADAEFQERLKEDTSFGGNLGRAVFQAKKRVLEPLGLVEEPVKTAPGKKRPVEHSPVEPDSSSGTGKAGQQPARKRLNFGQTGDADSVPDPQPLGQPPAAPSGLGTNTMATGSGAPMADNNEGADGVGNSSGNWHCDSTWMGDRVITTSTRTWALPTYNNHLYKQISSQSGASNDNHYFGYSTPWGYFDFNRFHCHFSPRDWQRLINNNWGFRPKRLKFKLFNIQVKEVTQNDGTTTIANNLTSTVQVFTDSEYQLPYVLGSAHQGCLPPFPADVFMVPQYGYLTLNNGSQAVGRSSFYCLEYFPSQMLRTGNNFTFSYTFEDVPFHSSYAHSQSLDRLMNPLIDQYLYYLSRTDTPSGTTTQSRLQFSQAGASDIRNQSRNWLPGPCYRQQRVSKTSADNNNSEYSWTGATKYHLNGRDSLVNPGPAMASHKDDEEKFFPQSGVLIFGKQGSEKTSVDIEKVMITDEEEIRTTNPVATEQYGSVSTNLQRGNRQAATADVNTQGVLPGMVWQDRDVYLQGPIWAKIPHTDGHFHPSPLMGGFGLKHPPPQILIKNTPVPANPSTTFSAAKFASFITQYSTGQVSVEIEWELQKENSKRWNPEVQYTSNYNKSVNVDFTVDTNGVYSEPRPIGTRYLTRNQ

SEQ ID NO: 5175 - DNA, 2208 bp, Artificial Sequence
  Description of Artificial Sequence: Synthetic polynucleotide
atggctgccgatggttatcttccagattggctcgaggacactctctctgaaggaataagacagtggtggaagctcaaacctggcccaccaccaccaaagcccgcagagcggcataaggacgacagcaggggtcttgtgcttcctgggtacaagtacctcggacccttcaacggactcgacaagggagagccggtcaacgaggcagacgccgcggccctcgagcacgacaaagcctatgaccggcagctcgacagcggagacaacccgtacctcaagtacaaccacgccgacgcggagtttcaggaacgccttaaagaagatacgtcttttgggggcaacctcggacgagcagtcttccaggcgaaaaagagggttcttgaacctctgggcctggttgaggaacctgttaagacggctccgggaaaaaagaggccggtagagcactctcctgtggagccagactcctcctcgggaaccggaaaggcgggccagcagcctgcaagaaaaagattgaattttggtcagactggagacgcagactcagtacctgacccccagcctctcggacagccaccagcagccccctctggtctgggaactaatacgatggctacaggcagtggcgcaccaatggcagacaataacgagggcgccgacggagtgggtaattcctcgggaaattggcattgcgattccacatggatgggcgacagagtcatcaccaccagcacccgaacctgggccctgcccacctacaacaaccacctctacaaacaaatttccagccaatcaggagcctcgaacgacaatcactactttggctacagcaccccttgggggtattttgacttcaacagattccactgccacttttcaccacgtgactggcaaagactcatcaacaacaactggggattccgacccaagagactcaagttcaagctctttaacattcaagtcaaagaggtcacgcagaatgacggtacgacgacgattgccaataaccttaccagcacggttcaggtgtttactgactcggagtaccagctcccgtacgtcctcggctcggcgcatcaaggatgcctcccgccgttcccagcagacgtcttcatggtgccacagtatggatacctcaccctgaacaacgggagtcaggcagtaggacgctcttcattttactgcctggagtactttccttctcagatgctgcgtaccggtaacaactttaccttcagctacacttttgaggacgttcctttccacagcagctacgctcacagccagagtctggaccgtctcatgaatcctctcatcgaccagtacctgtattacttgagcagaacagacactccaagtggaaccaccacgcagtcaaggcttcagttttctcaggccggagcgagtgacattcggaaccagtctaggaactggcttcctggaccctgttaccgccagcagcgagtatcaaagacatctgcggataacaacaacagtgaatactcgtggactggagctaccaagtaccacctcaatggcagagactctctggtgaatccgggcccggccatggcaagccacaaggacgatgaagaaaagttttttcctcagagcggggttctcatctttgggaagcaaggctcagagaaaacaagtgtggacattgaaaaggtcatgattacagacgaagaggaaatcaggacaaccaatcccgtggctacggagcagtatggttctgtatctaccaacctccagagaggcaacagacaagcagctaccgcagatgtcaacacacaaggcgttcttccaggcatggtctggcaggacagagatgtgtaccttcaggggcccatctgggcaaagattccacacacggacggacattttcacccctctcccctcatgggtggattcggacttaaacaccctcctccacagattctcatcaagaacaccccggtacctgcgaatccttcgaccaccttcagtgcggcaaagtttgcttccttcatcacacagtactccacgggacaggtcagcgtggagatcgagtgggagctgcagaaggaaaacagcaaacgctggaatcccgaagttcagtacacttccaactacaacaagtctgttaatgtggactttactgtggacactaatggcgtgtattcagagcctcgccccattggcaccagatacctgactcgtaatcagtaa

SEQ ID NO: 5176 - DNA, 2208 bp, Artificial Sequence
  Description of Artificial Sequence: Synthetic polynucleotide
atggctgccgatggttatcttccagattggctcgaggacactctctctgaaggaataagacagtggtggaagctcaaacctggcccaccaccaccaaagcccgcagagcggcataaggacgacagcaggggtcttgtgcttcctgggtacaagtacctcggacccttcaacggactcgacaagggagagccggtcaacgaggcagacgccgcggccctcgagcacgacaaagcctatgaccggcagctcgacagcggagacaacccgtacctcaagtacaaccacgccgacgcggagtttcaggagcgccttaaagaagatacgtcttttgggggcaacctcggacgagcagtcttccaggcgaaaaagagggttcttgaacctctgggcctggttgaggaacctgttaagacggctccgggaaaaaagaggccggtagagcactctcctgtggagccagactcctcctcgggaaccggaaaggcgggccagcagcctgcaagaaaaagattgaattttggtcagactggagacgcagactcagtacctgatccccagcctctcggacagccaccagcagccccctctggtctgggaactaatacgatggctacaggcagtggcgcaccaatggcagacaataacgagggcgccgacggagtgggtaattcctcgggaaattggcattgcgattccacatggatgggcgacagagtcatcaccaccagcacccgaacctgggccctgcccacctacaacaaccacctctacaaacaaatttccagccaatcaggagcctcgaacgacaatcactactttggctacagcaccccttgggggtattttgacttcaacagattccactgccacttttcaccacgtgactggcaaagactcatcaacaacaactggggattccgacccaagagactcaagttcaagctctttaacattcaagtcaaagaggtcacgcagaatgacggtacgacgacgattgccaataaccttaccagcacggttcaggtgtttactgactcggagtaccagctcccgtatgtcctcggctcggcgcatcaaggatgcctcccgccgttcccagcagacgtcttcatggtgccacagtatggatacctcaccctgaacaacgggagtcaggcagtaggacgctcttcattttactgcctggagtactttccttctcagatgctgcgtaccggtaacaactttaccttcagctacacttttgaggacgttcctttccacagcagctacgctcacagccagagtctggaccgtctcatgaatcctctcatcgaccagtacctgtattacttgagcagaacagacactccaagtggaaccaccacgcagtcaaggcttcagttttctcaggccggagcgagtgacattcgggaccagtctaggaactggcttcctggaccctgttaccgccagcagcgagtatcaaagacatctgcggataacaacaacagtgaatactcgtggactggagctaccaagtaccacctcaatggcagagactctctggtgaatccgggcccggccatggcaagccacaaggacgatgaagaaaagttttttcctcagagcggggttctcatctttgggaagcaaggctcagagaaaacaagtgtggacattgaaaaggtcatgattacagacgaagaggaaatcaggacaaccaatcccgtggctacggagcagtatggttctgtatctaccaacctccagagaggcaacagacaagcagctaccgcagatgtcaacacacaaggcgttcttccaggcatggtctggcaggacagagatgtgtaccttcaggggcccatctgggcaaagattccacacacggacggacattttcacccctctcccctcatgggtggattcggacttaaacaccctcctccacagattctcatcaagaacaccccggtacctgcgaatccttcgaccaccttcagtgcggcaaagtttgcttccttcatcacacagtactccacgggacaggtcagcgtggagatcgagtgggagctgcagaaggaaaacagcaaacgctggaatcccgaagttcagtacacttccaactacaacaagtctgttaatgtggactttactgtggacactaatggcgtgtattcagagcctcgccccattggcaccagatacctgactcgtaatctgtaa

SEQ ID NO: 5177 - protein, 735 aa, Artificial Sequence
  Description of Artificial Sequence: Synthetic polypeptide
MAADGYLPDWLEDTLSEGIRQWWKLKPGPPPPKPAERHKDDSRGLVLPGYKYLGPFNGLDKGEPVNEADAAALEHDKAYDRQLDSGDNPYLKYNHADAEFQERLKEDTSFGGNLGRAVFQAKKRVLEPLGLVEEPVKTAPGKKRPVEHSPVEPDSSSGTGKAGQQPARKRLNFGQTGDADSVPDPQPLGQPPAAPSGLGTNTMATGSGAPMADNNEGADGVGNSSGNWHCDSTWMGDRVITTSTRTWALPTYNNHLYKQISSQSGASNDNHYFGYSTPWGYFDFNRFHCHFSPRDWQRLINNNWGFRPKRLKFKLFNIQVKEVTQNDGTTTIANNLTSTVQVFTDSEYQLPYVLGSAHQGCLPPFPADVFMVPQYGYLTLNNGSQAVGRSSFYCLEYFPSQMLRTGNNFTFSYTFEDVPFHSSYAHSQSLDRLMNPLIDQYLYYLSRTDTPSGTTTQSRLQFSQAGASDIRDQSRNWLPGPCYRQQRVSKTSADNNNSEYSWTGATKYHLNGRDSLVNPGPAMASHKDDEEKFFPQSGVLIFGKQGSEKTSVDIEKVMITDEEEIRTTNPVATEQYGSVSTNLQRGNRQAATADVNTQGVLPGMVWQDRDVYLQGPIWAKIPHTDGHFHPSPLMGGFGLKHPPPQILIKNTPVPANPSTTFSAAKFASFITQYSTGQVSVEIEWELQKENSKRWNPEVQYTSNYNKSVNVDFTVDTNGVYSEPRPIGTRYLTRNL

SEQ ID NO: 5178 - DNA, 2172 bp, Artificial Sequence
  Description of Artificial Sequence: Synthetic polynucleotide
atgtcttttgttgatcaccctccagattggttggaagaagttggtgaaggtcttcgcgagtttttgggccttgaagcgggcccaccgaaaccaaaacccaatcagcagcatcaagatcaagcccgtggtcttgtgctgcctggttataactatctcggacccggaaacggtctcgatcgaggagagcctgtcaacagggcagacgaggtcgcgcgagagcacgacatctcgtacaacgagcagcttgaggcgggagacaacccctacctcaagtacaaccacgcggacgccgagtttcaggagaagctcgccgacgacacatccttcgggggaaacctcggaaaggcagtctttcaggccaagaaaagggttctcgaaccttttggcctggttgaagagggtgctaagacggcccctaccggaaagcggatagacgaccactttccaaaaagaaagaaggctcggaccgaagaggactccaagccttccacctcgtcagacgccgaagctggacccagcggatcccagcagctgcaaatcccagcccaaccagcctcaagtttgggagctgatacaatgtctgcgggaggtggcggcccattgggcgacaataaccaaggtgccgatggagtgggcaatgcctcgggagattggcattgcgattccacgtggatgggggacagagtcgtcaccaagtccacccgaacctgggtgctgcccagctacaacaaccaccagtaccgagagatcaaaagcggctccgtcgacggaagcaacgccaacgcctactttggatacagcaccccctgggggtactttgactttaaccgcttccacagccactggagcccccgagactggcaaagactcatcaacaactactggggcttcagaccccggtccctcagagtcaaaatcttcaacattcaagtcaaagaggtcacggtgcaggactccaccaccaccatcgccaacaacctcacctccaccgtccaagtgtttacggacgacgactaccagctgccctacgtcgtcggcaacgggaccgagggatgcctgccggccttccctccgcaggtctttacgctgccgcagtacggttacgcgacgctgaaccgcgacaacacagaaaatcccaccgagaggagcagcttcttctgcctagagtactttcccagcaagatgctgagaacgggcaacaactttgagtttacctacaactttgaggaggtgcccttccactccagcttcgctcccagtcagaacctgttcaagctggccaacccgctggtggaccagtacttgtaccgcttcgtgagcacaaataacactggcggagtccagttcaacaagaacctggccgggagatacgccaacacctacaaaaactggttcccggggcccatgggccgaacccagggctggaacctgggctccggggtcaaccgcgccagtgtcagcgccttcgccacgaccaataggatggagctcgagggcgcgagttaccaggtgcccccgcagccgaacggcatgaccaacaacctccagggcagcaacacctatgccctggagaacactatgatcttcaacagccagccggcgaacccgggcaccaccgccacgtacctcgagggcaacatgctcatcaccagcgagagcgagacgcagccggtgaaccgcgtggcgtacaacgtcggcgggcagatggccaccaacaaccagagctccaccactgcccccgcgaccggcacgtacaacctccaggaaatcgtgcccggcagcgtgtggatggagagggacgtgtacctccaaggacccatctgggccaagatcccagagacgggggcgcactttcacccctctccggccatgggcggattcggactcaaacacccaccgcccatgatgctcatcaagaacacgcctgtgcccggaaatatcaccagcttctcggacgtgcccgtcagcagcttcatcacccagtacagcaccgggcaggtcaccgtggagatggagtgggagctcaagaaggaaaactccaagaggtggaacccagagatccagtacacaaacaactacaacgacccccagtttgtggactttgccccggacagcaccggggaatacagaaccaccagacctatcggaacccgataccttacccgacccctt

SEQ ID NO: 5179 - DNA, 2214 bp, Artificial Sequence
  Description of Artificial Sequence: Synthetic polypeptide
atggctgccgatggttatcttccagattggctcgaggacaacctctctgagggcattcgcgagtggtgggcgctgaaacctggagccccgaagcccaaagccaaccagcaaaagcaggacgacggccggggtctggtgcttcctggctacaagtacctcggacccttcaacggactcgacaagggggagcccgtcaacgcggcggacgcagcggccctcgagcacgacaaggcctacgaccagcagctgcaggcgggtgacaatccgtacctgcggtataaccacgccgacgccgagtttcaggagcgtctgcaagaagatacgtcttttgggggcaacctcgggcgagcagtcttccaggccaagaagcgggttctcgaacctctcggtctggttgaggaaggcgctaagacggctcctggaaagaagagaccggtagagccatcaccccagcgttctccagactcctctacgggcatcggcaagaaaggccaacagcccgccagaaaaagactcaattttggtcagactggcgactcagagtcagttccagaccctcaacctctcggagaacctccagcagcgccctctggtgtgggacctaatacaatggctgcaggcggtggcgcaccaatggcagacaataacgaaggcgccgacggagtgggtagttcctcgggaaattggcattgcgattccacatggctgggcgacagagtcatcaccaccagcacccgaacctgggccctgcccacctacaacaaccacctctacaagcaaatctccaacgggacatcgggaggagccaccaacgacaacacctacttcggctacagcaccccctgggggtattttgactttaacagattccactgccacttttcaccacgtgactggcagcgactcatcaacaacaactggggattccggcccaagagactcagcttcaagctcttcaacatccaggtcaaggaggtcacgcagaatgaaggcaccaagaccatcgccaataacctcaccagcaccatccaggtgtttacggactcggagtaccagctgccgtacgttctcggctctgcccaccagggctgcctgcctccgttcccggcggacgtgttcatgattccccagtacggctacctaacactcaacaacggtagtcaggccgtgggacgctcctccttctactgcctggaatactttccttcgcagatgctgagaaccggcaacaacttccagtttacttacaccttcgaggacgtgcctttccacagcagctacgcccacagccagagcttggaccggctgatgaatcctctgattgaccagtacctgtactacttgtctcggactcaaacaacaggaggcacggcaaatacgcagactctgggcttcagccaaggtgggcctaatacaatggccaatcaggcaaagaactggctgccaggaccctgttaccgccaacaacgcgtctcaacgacaaccgggcaaaacaacaatagcaactttgcctggactgctgggaccaaataccatctgaatggaagaaattcattggctaatcctggcatcgctatggcaacacacaaagacgacgaggagcgtttttttcccagtaacgggatcctgatttttggcaaacaaaatgctgccagagacaatgcggattacagcgatgtcatgctcaccagcgaggaagaaatcaaaaccactaaccctgtggctacagaggaatacggtatcgtggcagataacttgcctgagcggacggcgatgagtcttccgggaactgtcaacagccagggggccttacccggtatggtctggcagaaccgggacgtgtacctgcagggtcccatctgggccaagattcctcacacggacggcaacttccacccgtctccgctgatgggcggctttggcctgaaacatcctccgcctcagatcctgatcaagaacacgcctgtacctgcggatcctccgaccaccttcaaccagtcaaagctgaactctttcatcacgcaatacagcaccggacaggtcagcgtggaaattgaatgggagctgcagaaggaaaacagcaagcgctggaaccccgagatccagtacacctccaactactacaaatctacaagtgtggactttgctgttaatacagaaggcgtgtactctgaaccccgccccattggcacccgttacctcacccgtaatctg

SEQ ID NO: 5180 - protein, 738 aa, Artificial Sequence
  Description of Artificial Sequence: Synthetic polypeptide
MAADGYLPDWLEDNLSEGIREWWALKPGAPKPKANQQKQDDGRGLVLPGYKYLGPFNGLDKGEPVNAADAAALEHDKAYDQQLQAGDNPYLRYNHADAEFQERLQEDTSFGGNLGRAVFQAKKRVLEPLGLVEEGAKTAPGKKRPVEPSPQRSPDSSTGIGKKGQQPARKRLNFGQTGDSESVPDPQPLGEPPAAPSGVGPNTMAAGGGAPMADNNEGADGVGSSSGNWHCDSTWLGDRVITTSTRTWALPTYNNHLYKQISNGTSGGATNDNTYFGYSTPWGYFDFNRFHCHFSPRDWQRLINNNWGFRPKRLSFKLFNIQVKEVTQNEGTKTIANNLTSTIQVFTDSEYQLPYVLGSAHQGCLPPFPADVFMIPQYGYLTLNNGSQAVGRSSFYCLEYFPSQMLRTGNNFQFTYTFEDVPFHSSYAHSQSLDRLMNPLIDQYLYYLSRTQTTGGTANTQTLGFSQGGPNTMANQAKNWLPGPCYRQQRVSTTTGQNNNSNFAWTAGTKYHLNGRNSLANPGIAMATHKDDEERFFPSNGILIFGKQNAARDNADYSDVMLTSEEEIKTTNPVATEEYGIVADNLPERTAMSLPGTVNSQGALPGMVWQNRDVYLQGPIWAKIPHTDGNFHPSPLMGGFGLKHPPPQILIKNTPVPADPPTTFNQSKLNSFITQYSTGQVSVEIEWELQKENSKRWNPEIQYTSNYYKSTSVDFAVNTEGVYSEPRPIGTRYLTRNL

SEQ ID NO: 5181 - DNA, 2214 bp, Artificial Sequence
  Description of Artificial Sequence: Synthetic polynucleotide
atggctgccgatggttatcttccagattggctcgaggacaacctctctgagggcattcgcgagtggtgggcgctgaaacctggagccccgaagcccaaagccaaccagcaaaagcaggacgacggccggggtctggtgcttcctggctacaagtacctcggacccttcaacggactcgacaagggggagcccgtcaacgcggcggacgcagcggccctcgagcacgacaaggcctacgaccagcagctgcaggcgggtgacaatccgtacctgcggtataaccacgccgacgccgagtttcaggagcgtctgcaagaagatacgtcttttgggggcaacctcgggcgagcagtcttccaggccaagaagcgggttctcgaacctctcggtctggttgaggaaggcgctaagacggctcctggaaagaagagaccggtagagccatcaccccagcgttctccagactcctctacgggcatcggcaagaaaggccaacagcccgccagaaaaagactcaattttggtcagactggcgactcagagtcagttccagaccctcaacctctcggagaacctccagcagcgccctctggtgtgggacctaatacaatggctgcaggcggtggcgcaccaatggcagacaataacgaaggcgccgacggagtgggtagttcctcgggaaattggcattgcgattccacatggctgggcgacagagtcatcaccaccagcacccgaacctgggccctgcccacctacaacaaccacctctacaagcaaatctccaacgggacatcgggaggagccaccaacgacaacacctacttcggctacagcaccccctgggggtattttgactttaacagattccactgccacttttcaccacgtgactggcagcgactcatcaacaacaactggggattccggcccaagagactcagcttcaagctcttcaacatccaggtcaaggaggtcacgcagaatgaaggcaccaagaccatcgccaataacctcaccagcaccatccaggtgtttacggactcggagtaccagctgccgtacgttctcggctctgcccaccagggctgcctgcctccgttcccggcggacgtgttcatgattccccagtacggctacctaacactcaacaacggtagtcaggccgtgggacgctcctccttctactgcctggaatactttccttcgcagatgctgagaaccggcaacaacttccagtttacttacaccttcgaggacgtgcctttccacagcagctacgcccacagccagagcttggaccggctgatgaatcctctgattgaccagtacctgtactacttgtctcggactcaaacaacaggaggcacggcaaatacgcagactctgggcttcagccaaggtgggcctaatacaatggccaatcaggcaaagaactggctgccaggaccctgttaccgccaacaacgcgtctcaacgacaaccgggcaaaacaacaatagcaactttgcctggactgctgggaccaaataccatctgaatggaagaaattcattggctaatcctggcatcgctatggcaacacacaaagacgacgaggagcgtttttttcccagtaacgggatcctgatttttggcaaacaaaatgctgccagagacaatgcggattacagcgatgtcatgctcaccagcgaggaagaaatcaaaaccactaaccctgtggctacagaggaatacggtatcgtggcagataacttgagttttagtcgtgcggttctttgtgatggaactgtcaacagccagggggccttacccggtatggtctggcagaaccgggacgtgtacctgcagggtcccatctgggccaagattcctcacacggacggcaacttccacccgtctccgctgatgggcggctttggcctgaaacatcctccgcctcagatcctgatcaagaacacgcctgtacctgcggatcctccgaccaccttcaaccagtcaaagctgaactctttcatcacgcaatacagcaccggacaggtcagcgtggaaattgaatgggagctgcagaaggaaaacagcaagcgctggaaccccgagatccagtacacctccaactactacaaatctacaagtgtggactttgctgttaatacagaaggcgtgtactctgaaccccgccccattggcacccgttacctcacccgtaatctg

SEQ ID NO: 5182 - protein, 738 aa, Artificial Sequence
  Description of Artificial Sequence: Synthetic polypeptide
MAADGYLPDWLEDNLSEGIREWWALKPGAPKPKANQQKQDDGRGLVLPGYKYLGPFNGLDKGEPVNAADAAALEHDKAYDQQLQAGDNPYLRYNHADAEFQERLQEDTSFGGNLGRAVFQAKKRVLEPLGLVEEGAKTAPGKKRPVEPSPQRSPDSSTGIGKKGQQPARKRLNFGQTGDSESVPDPQPLGEPPAAPSGVGPNTMAAGGGAPMADNNEGADGVGSSSGNWHCDSTWLGDRVITTSTRTWALPTYNNHLYKQISNGTSGGATNDNTYFGYSTPWGYFDFNRFHCHFSPRDWQRLINNNWGFRPKRLSFKLFNIQVKEVTQNEGTKTIANNLTSTIQVFTDSEYQLPYVLGSAHQGCLPPFPADVFMIPQYGYLTLNNGSQAVGRSSFYCLEYFPSQMLRTGNNFQFTYTFEDVPFHSSYAHSQSLDRLMNPLIDQYLYYLSRTQTTGGTANTQTLGFSQGGPNTMANQAKNWLPGPCYRQQRVSTTTGQNNNSNFAWTAGTKYHLNGRNSLANPGIAMATHKDDEERFFPSNGILIFGKQNAARDNADYSDVMLTSEEEIKTTNPVATEEYGIVADNLSFSRAVLCDGTVNSQGALPGMVWQNRDVYLQGPIWAKIPHTDGNFHPSPLMGGFGLKHPPPQILIKNTPVPADPPTTFNQSKLNSFITQYSTGQVSVEIEWELQKENSKRWNPEIQYTSNYYKSTSVDFAVNTEGVYSEPRPIGTRYLTRNL

SEQ ID NO: 5183 - DNA, 2215 bp, Artificial Sequence
  Description of Artificial Sequence: Synthetic polynucleotide
atggctgccgatggttatcttccagattggctcgaggacactctctctgaaggaataagacagtggtggaagctcaaacctggcccaccaccaccaaagcccgcagagcggcataaggacgacagcaggggtcttgtgcttcctgggtacaagtacctcggacccttcaacggactcgacaagggagagccggtcaacgaggcagacgccgcggccctcgagcacgacaaagcctacgaccggcagctcgacagcggagacaacccgtacctcaagtacaaccacgccgacgccgagttccaggagcggctcaaagaagatacgtcttttgggggcaacctcgggcgagcagtcttccaggccaaaaagaggcttcttgaacctcttggtctggttgaggaagcggctaagacggctcctggaaagaagaggcctgtagagcactctcctgtggagccagactcctcctcgggaaccggaaaggcgggccagcagcctgcaagaaaaagattgaattttggtcagactggagacgcagactcagtcccagaccctcaaccaatcggagaacctcccgcagccccctcaggtgtgggatctcttacaatggctgcaggcggtggcgcaccaatggcagacaataacgagggcgccgacggagtgggtaattcctcgggaaattggcattgcgattccacatggatgggcgacagagtcatcaccaccagcacccgaacctgggccctgcccacctacaacaaccacctctacaagcaaatctccaacagcacatctggaggatcttcaaatgacaacgcctacttcggctacagcaccccctgggggtattttgactttaacagattccactgccacttttcaccacgtgactggcagcgactcatcaacaacaactggggattccggcccaagagactcagcttcaagctcttcaacatccaggtcaaggaggtcacgcagaatgaaggcaccaagaccatcgccaataacctcaccagcaccatccaggtgtttacggactcggagtaccagctgccgtacgttctcggctctgcccaccagggctgcctgcctccgttcccggcggacgtgttcatgattccccagtacggctacctaacactcaacaacggtagtcaggccgtgggacgctcctccttctactgcctggaatactttccttcgcagatgctgagaaccggcaacaacttccagtttacttacaccttcgaggacgtgcctttccacagcagctacgcccacagccagagcttggaccggctgatgaatcctctgattgaccagtacctgtactacttgtctcggactcaaacaacaggaggcacgacaaatacgcagactctgggcttcagccaaggtgggcctaatacaatggccaatcaggcaaagaactggctgccaggaccctgttaccgccagcagcgagtatcaaagacatctgcggataacaacaacagtgaatactcgtggactggagctaccaagtaccacctcaatggcagagactctctggtgaatccgggcccggccatggcaagccacaaggacgatgaagaaaagtttttttcctcagagcggggttctcatctttgggaagcaaggctcagagaaaacaaatgtggacattgaaaaggtcatgattacagacgaagaggaaatcaggacaaccaatcccgtggctacggagcagtatggttctgtatctaccaacctccagagaggcaacagacaagcagctaccgcagatgtcaacacacaaggcgttcttccaggcatggtctggcaggacagagatgtgtaccttcaggggcccatctgggcaaagattccacacacggacggacattttcacccctctcccctcatgggtggattcggacttaaacaccctccgcctcagatcctgatcaagaacacgcctgtacctgcggatcctccgaccaccttcaaccagtcaaagctgaactctttcatcacccagtattctactggccaagtcagcgtggagatcgagtgggagctgcagaaggaaaacagcaagcgctggaaccccgagatccagtacacctccaactactacaaatctacaagtgtggactttgctgttaatacagaaggcgtgtactctgaaccccgccccattggcacccgttacctcacccgtaatctgtaa

SEQ ID NO: 5184 - protein, 737 aa, Artificial Sequence
  Description of Artificial Sequence: Synthetic polypeptide
MAADGYLPDWLEDTLSEGIRQWWKLKPGPPPPKPAERHKDDSRGLVLPGYKYLGPFNGLDKGEPVNEADAAALEHDKAYDRQLDSGDNPYLKYNHADAEFQERLKEDTSFGGNLGRAVFQAKKRLLEPLGLVEEAAKTAPGKKRPVEHSPVEPDSSSGTGKAGQQPARKRLNFGQTGDADSVPDPQPIGEPPAAPSGVGSLTMAAGGGAPMADNNEGADGVGNSSGNWHCDSTWMGDRVITTSTRTWALPTYNNHLYKQISNSTSGGSSNDNAYFGYSTPWGYFDFNRFHCHFSPRDWQRLINNNWGFRPKRLSFKLFNIQVKEVTQNEGTKTIANNLTSTIQVFTDSEYQLPYVLGSAHQGCLPPFPADVFMIPQYGYLTLNNGSQAVGRSSFYCLEYFPSQMLKTGNNFQFTYTFEDVPFHSSYAHSQSLDRLMNPLIDQYLYYLSRTQTTGGTTNTQTLGFSQGGPNTMANQAKNWLPGPCYRQQRVSKTSADNNNSEYSWTGATKYHLNGRDSLVNPGPAMASHKDDEEKFFPQSGVLIFGKQGSEKTNVDIEKVMITDEEEIRTTNPVATEQYGSVSTNLQRGNRQAATADVNTQGVLPGMVWQDRDVYLQGPIWAKIPHTDGHFHPSPLMGGFGLKHPPPQILIKNTPVPADPPTTFNQSKLNSFITQYSTGQVSVEIEWELQKENSKRWNPEIQYTSNYYKSTSVDFAVNTEGVYSEPRPIGTRYLTRNL

SEQ ID NO: 5185 - protein, 737 aa, Artificial Sequence
  Description of Artificial Sequence: Synthetic polypeptide
MAADGYLPDWLEDTLSEGIRQWWKLKPGPPPPKPAERHKDDSRGLVLPGYKYLGPFNGLDKGEPVNEADAAALEHDKAYDRQLDSGDNPYLKYNHADAEFQERLKEDTSFGGNLGRAVFQAKKRLLEPLGLVEEAAKTAPGKKRPVEHSPVEPDSSSGTGKAGQQPARKRLNFGQTGDADSVPDPQPIGEPPAAPSGVGSLTMAAGGGAPMADNNEGADGVGNSSGNWHCDSTWMGDRVITTSTRTWALPTYNNHLYKQISNSTSGGSSNDNAYFGYSTPWGYFDFNRFHCHFSPRDWQRLINNNWGFRPKRLSFKLFNIQVKEVTQNEGTKTIANNLTSTIQVFTDSEYQLPYVLGSAHQGCLPPFPADVFMIPQYGYLTLNNGSQAVGRSSFYCLEYFPSQMLKTGNNFQFTYTFEDVPFHSSYAHSQSLDRLMNPLIDQYLYYLSRTQTTGGTTNTQTLGFSQGGPNTMANQAKNWLPGPCYRQQRVSKTSADNNNSEYSWTGATKYHLNGRDSLVNPGPAMASHKDDEEKFFPQSGVLIFGKQGSEKTNVDIEKVMITDEEEIRTTNPVATEQYGSVSTNLQQGNTQAATADVNTQGVLPGMVWQDRDVYLQGPIWAKIPHTDGHFHPSPLMGGFGLKHPPPQILIKNTPVPADPPTTFNQSKLNSFITQYSTGQVSVEIEWELQKENSKRWNPEIQYTSNYYKSTSVDFAVNTEGVYSEPRPIGTRYLTRNL

SEQ ID NO: 5186 - protein, 737 aa, Artificial Sequence
  Description of Artificial Sequence: Synthetic polypeptide
MAADGYLPDWLEDTLSEGIRQWWKLKPGPPPPKPAERHKDDSRGLVLPGYKYLGPFNGLDKGEPVNEADAAALEHDKAYDRQLDSGDNPYLKYNHADAEFQERLKEDTSFGGNLGRAVFQAKKRLLEPLGLVEEAAKTAPGKKRPVEHSPVEPDSSSGTGKAGQQPARKRLNFGQTGDADSVPDPQPIGEPPAAPSGVGSLTMAAGGGAPMADNNEGADGVGNSSGNWHCDSTWMGDRVITTSTRTWALPTYNNHLYKQISNSTSGGSSNDNAYFGYSTPWGYFDFNRFHCHFSPRDWQRLINNNWGFRPKRLSFKLFNIQVKEVTQNEGTKTIANNLTSTIQVFTDSEYQLPYVLGSAHQGCLPPFPADVFMIPQYGYLTLNNGSQAVGRSSFYCLEYFPSQMLRTGNNFQFTYTFEDVPFHSSYAHSQSLDRLMNPLIDQYLYYLSRTQTTGGTTNTQTLGFSQGGPNTMANQAKNWLPGPCYRQQRVSKTSADNNNSEYSWTGATKYHLNGRDSLVNPGPAMASHKDDEEKFFPQSGVLIFGKQGSEKTNVDIEKVMITDEEEIRTTNPVATEQYGSVSTNLQQGNTQAATADVNTQGVLPGMVWQDRDVYLQGPIWAKIPHTDGHFHPSPLMGGFGLKHPPPQILIKNTPVPADPPTTFNQSKLNSFITQYSTGQVSVEIEWELQKENSKRWNPEIQYTSNYYKSTSVDFAVNTEGVYSEPRPIGTRYLTRNL

SEQ ID NO: 5187 - DNA, 2214 bp, Artificial Sequence
  Description of Artificial Sequence: Synthetic polynucleotide
atggctgccgatggttatcttccagattggctcgaggacaaccttagtgaaggaattcgcgagtggtgggctttgaaacctggagcccctcaacccaaggcaaatcaacaacatcaagacaacgctcgaggtcttgtgcttccgggttacaaataccttggacccggcaacggactcgacaagggggagccggtcaacgcagcagacgcggcggccctcgagcacgacaaggcctacgaccagcagctgcaggcgggtgacaatccgtacctgcggtataaccacgccgacgccgagtttcaggagcgtctgcaagaagatacgtcttttgggggcaaccttggcagagcagtcttccaggccaaaaagaggatccttgagcctcttggtctggttgaggaagcagctaaaacggctcctggaaagaagaggcctgtagatcagtctcctcaggaaccggactcatcatctggtgttggcaaatcgggcaaacagcctgccagaaaaagactaaatttcggtcagactggcgactcagagtcagtcccagaccctcaacctctcggagaaccaccagcagcccccacaagtttgggatctaatacaatggcttcaggcggtggcgcaccaatggcagacaataacgagggtgccgatggggtgggtagttcctcgggaaattggcattgcgattcccaatggctgggggacagagtcatcaccaccagcacccgaacctgggccctgcccacctacaacaatcacctctacaagcaaatctccaacgggacatcgggaggagccaccaacgacaacacctacttcggctacagcaccccctgggggtattttgactttaacagattccactgccacttttcaccacgtgactggcagcgactcatcaacaacaactggggattccggcccaagagactcagcttcaagctcttcaacatccaggtcaaggaggtcacgcagaatgaaggcaccaagaccatcgccaataacctcaccagcaccatccaggtgtttacggactcggagtaccagctgccgtacgttctcggctctgcgcaccagggctgcctccctccgttcccggcggacgtgttcatgattccgcaatacggctacctgacgctcaacaatggcagccaagccgtgggacgttcatccttttactgcctggaatatttcccttctcagatgctgagaacgggcaacaactttaccttcagctacacctttgaggaagtgcctttccacagcagctacgcgcacagccagagcttggaccggctgatgaatcctctgattgaccagtacctgtactacttgtctcggactcaaacaacaggaggcacggcaaatacgcagactctgggcttcagccaaggtgggcctaatacaatggccaatcaggcaaagaactggctgccaggaccctgttaccgccaacaacgcgtctcaacgacaaccgggcaaaacaacaatagcaactttgcctggactgctgggaccaaataccatctgaatggaagaaattcattggctaatcctggcatcgctatggcaacacacaaagacgacgaggagcgtttttttcccagtaacgggatcctgatttttggcaaacaaaatgctgccagagacaatgcggattacagcgatgtcatgctcaccagcgaggaagaaatcaaaaccactaaccctgtggctacagaggaatacggtatcgtggcagataacttgcagcagcaaaacacggctcctcaaattggaactgtcaacagccagggggccttacccggtatggtctggcagaaccgggacgtgtacctgcagggtcccatctgggccaagattcctcacacggacggcaacttccacccgtctccgctgatgggcggctttggcctgaaacatcctccgcctcagatcctgatcaagaacacgcctgtacctgcggatcctccgaccaccttcaaccagtcaaagctgaactctttcatcacgcaatacagcaccggacaggtcagcgtggagatcgagtgggagctgcagaaggaaaacagcaagcgctggaacccggagatccagtacacttccaactattacaagtctaataatgttgaatttgctgttaatactgaaggtgtatatagtgaaccccgccccattggcaccagatacctgactcgtaatctgtaa

SEQ ID NO: 5188 - protein, 737 aa, Artificial Sequence
  Description of Artificial Sequence: Synthetic polypeptide
MAADGYLPDWLEDNLSEGIREWWALKPGAPQPKANQQHQDNARGLVLPGYKYLGPGNGLDKGEPVNAADAAALEHDKAYDQQLQAGDNPYLRYNHADAEFQERLQEDTSFGGNLGRAVFQAKKRILEPLGLVEEAAKTAPGKKRPVDQSPQEPDSSSGVGKSGKQPARKRLNFGQTGDSESVPDPQPLGEPPAAPTSLGSNTMASGGGAPMADNNEGADGVGSSSGNWHCDSQWLGDRVITTSTRTWALPTYNNHLYKQISNGTSGGATNDNTYFGYSTPWGYFDFNRFHCHFSPRDWQRLINNNWGFRPKRLSFKLFNIQVKEVTQNEGTKTIANNLTSTIQVFTDSEYQLPYVLGSAHQGCLPPFPADVFMIPQYGYLTLNNGSQAVGRSSFYCLEYFPSQMLRTGNNFTFSYTFEEVPFHSSYAHSQSLDRLMNPLIDQYLYYLSRTQTTGGTANTQTLGFSQGGPNTMANQAKNWLPGPCYRQQRVSTTTGQNNNSNFAWTAGTKYHLNGRNSLANPGIAMATHKDDEERFFPSNGILIFGKQNAARDNADYSDVMLTSEEEIKTTNPVATEEYGIVADNLQQQNTAPQIGTVNSQGALPGMVWQNRDVYLQGPIWAKIPHTDGNFHPSPLMGGFGLKHPPPQILIKNTPVPADPPTTFNQSKLNSFITQYSTGQVSVEIEWELQKENSKRWNPEIQYTSNYYKSNNVEFAVNTEGVYSEPRPIGTRYLTRNL

SEQ ID NO: 5189 - DNA, 2211 bp, Artificial Sequence
  Description of Artificial Sequence: Synthetic polynucleotide
atggctgccgatggttatcttccagattggctcgaggacaacctctctgagggcattcgcgagtggtgggacttgaaacctggagccccgaagcccaaagccaaccagcaaaagcaggacgacggccggggtctggtgcttcctggctacaagtacctcggacccttcaacggactcgacaagggggagcccgtcaacgcggcggacgcagcggccctcgagcacgacaaggcctacgaccagcagctcaaagcgggtgacaatccgtacctgcggtataaccacgccgacgccgagtttcaggagcgtctgcaagaagatacgtcttttgggggcaacctcgggcgagcagtcttccaggccaagaagcgggttctcgaacctctcggtctggttgaggaaggcgctaagacggctcctggaaagaaacgtccggtagagcagtcgccacaagagccagactcctcctcgggcatcggcaagacaggccagcagcccgctaaaaagagactcaattttggtcagactggcgactcagagtcagtccccgacccacaacctctcggagaacctccagcaacccccgctgctgtgggacctactacaatggcttcaggcggtggcgcaccaatggcagacaataacgaaggcgccgacggagtgggtaatgcctcaggaaattggcattgcgattccacatggctgggcgacagagtcatcaccaccagcacccgaacatgggccttgcccacctataacaaccacctctacaagcaaatctccagtgcttcaacgggggccagcaacgacaaccactacttcggctacagcaccccctgggggtattttgatttcaacagattccactgccatttctcaccacgtgactggcagcgactcatcaacaacaattggggattccggcccaagagactcaacttcaagctcttcaacatccaagtcaaggaggtcacgacgaatgatggcgtcacgaccatcgctaataaccttaccagcacggttcaagtcttctcggactcggagtaccagctgccgtacgttctcggctctgcccaccagggctgcctgcctccgttcccggcggacgtgttcatgattccccagtacggctacctaacactcaacaacggtagtcaggccgtgggacgctcctccttctactgcctggaatactttccttcgcagatgctgagaaccggcaacaacttccagtttacttacaccttcgaggacgtgcctttccacagcagctacgcccacagccagagcttggaccggctgatgaatcctctgattgaccagtacctgtactacttgtctcggactcaaacaacaggaggcacggcaaatacgcagactctgggcttcagccaaggtgggcctaatacaatggccaatcaggcaaagaactggctgccaggaccctgttaccgccaacaacgcgtctcaacgacaaccgggcaaaacaacaatagcaattttacctggactggtgcttcaaaatataacctcaatgggcgtgaatccatcatcaaccctggcactgctatggcctcacacaaagacgacgaagacaagttctttcccatgagcggtgtcatgatttttggaaaagagagcgccggagcttcaaacactgcattggacaatgtcatgattacagacgaagaggaaattaaagccactaaccctgtggccaccgaaagatttgggaccgtggcagtcaatttccagagcagcagcacagaccctgcgaccggagatgtgcatgctatgggagcattacctggcatggtgtggcaagatagagacgtgtacctgcagggtcccatttgggccaaaattcctcacacagatggacactttcacccgtctcctcttatgggcggctttggactcaagaacccgcctcctcagatcctcatcaaaaacacgcctgttcctgcgaatcctccggcggagttttcagctacaaagtttgcttcattcatcacccaatactccacaggacaagtgagtgtggaaattgaatgggagctgcagaaagaaaacagcaagcgctggaatcccgaagtgcagtacacatccaattatgcaaaatctgccaacgttgattttactgtggacaacaatggactttatactgagcctcgccccattggcacccgttacctcacccgtcccctgtaa

SEQ ID NO: 5190 - protein, 736 aa, Artificial Sequence
  Description of Artificial Sequence: Synthetic polypeptide
MAADGYLPDWLEDNLSEGIREWWDLKPGAPKPKANQQKQDDGRGLVLPGYKYLGPFNGLDKGEPVNAADAAALEHDKAYDQQLKAGDNPYLRYNHADAEFQERLQEDTSFGGNLGRAVFQAKKRVLEPLGLVEEGAKTAPGKKRPVEQSPQEPDSSSGIGKTGQQPAKKRLNFGQTGDSESVPDPQPLGEPPATPAAVGPTTMASGGGAPMADNNEGADGVGNASGNWHCDSTWLGDRVITTSTRTWALPTYNNHLYKQISSASTGASNDNHYFGYSTPWGYFDFNRFHCHFSPRDWQRLINNNWGFRPKRLNFKLFNIQVKEVTTNDGVTTIANNLTSTVQVFSDSEYQLPYVLGSAHQGCLPPFPADVFMIPQYGYLTLNNGSQAVGRSSFYCLEYFPSQMLRTGNNFQFTYTFEDVPFHSSYAHSQSLDRLMNPLIDQYLYYLSRTQTTGGTANTQTLGFSQGGPNTMANQAKNWLPGPCYRQQRVSTTTGQNNNSNFTWTGASKYNLNGRESIINPGTAMASHKDDEDKFFPMSGVMIFGKESAGASNTALDNVMITDEEEIKATNPVATERFGTVAVNFQSSSTDPATGDVHAMGALPGMVWQDRDVYLQGPIWAKIPHTDGHFHPSPLMGGFGLKNPPPQILIKNTPVPANPPAEFSATKFASFITQYSTGQVSVEIEWELQKENSKRWNPEVQYTSNYAKSANVDFTVDNNGLYTEPRPIGTRYLTRPL

SEQ ID NO: 5191 - DNA, 2211 bp, Artificial Sequence
  Description of Artificial Sequence: Synthetic polynucleotide
atggctgctgacggttatcttccagattggctcgaggacaacctttctgaaggcattcgagagtggtgggcgctgcaacctggagcccctaaacccaaggcaaatcaacaacatcaggacaacgctcggggtcttgtgcttccgggttacaaatacctcggacccggcaacggactcgacaagggggaacccgtcaacgcagcggacgcggcagccctcgagcacgacaaggcctacgaccagcagctcaaggccggtgacaacccctacctcaagtacaaccacgccgacgccgagttccaggagcggctcaaagaagatacgtcttttgggggcaacctcgggcgagcagtcttccaggccaaaaagaggcttcttgaacctcttggtctggttgaggaagcggctaagacggctcctggaaagaagaggcctgtagatcagtctcctcaggaaccggactcatcatctggtgttggcaaatcgggcaaacagcctgccagaaaaagactaaatttcggtcagactggcgactcagagtcagtcccagaccctcaacctctcggagaaccaccagcagcccccacaagtttgggatctaatacaatggcttcaggcggtggcgcaccaatggcagacaataacgagggtgccgatggagtgggtaattcctcaggaaattggcattgcgattcccaatggctgggcgacagagtcatcaccaccagcaccagaacctgggccctgcccacttacaacaaccatctctacaagcaaatctccagccaatcaggagcttcaaacgacaaccactactttggctacagcaccccttgggggtattttgactttaacagattccactgccacttctcaccacgtgactggcagcgactcattaacaacaactggggattccggcccaagaaactcagcttcaagctcttcaacatccaagttaaagaggtcacgcagaacgatggcacgacgactattgccaataaccttaccagcacggttcaagtgtttacggactcggagtatcagctcccgtacgtgctcgggtcggcgcaccaaggctgtctcccgccgtttccagcggacgtcttcatggtccctcagtatggatacctcaccctgaacaacggaagtcaagcggtgggacgctcatccttttactgcctggagtacttcccttcgcagatgctaaggactggaaataacttccaattcagctataccttcgaggatgtaccttttcacagcagctacgctcacagccagagtttggatcgcttgatgaatcctcttattgatcagtatctgtactacctgaacagaacgcaaggaacaacctctggaacaaccaaccaatcacggctgctttttagccaggctgggcctcagtctatgtctttgcaggccagaaattggctacctgggccctgctaccggcaacagagactttcaaagactgctaacgacaacaacaacagtaactttccttggacagcggccagcaaatatcatctcaatggccgcgactcgctggtgaatccaggaccagctatggccagtcacaaggacgatgaagaaaaatttttccctatgcacggcaatctaatatttggcaaagaagggacaacggcaagtaacgcagaattagataatgtaatgattacggatgaagaagagattcgtaccaccaatcctgtggcaacagagcagtatggaactgtggcaaataacttgcagagctcaaatacagctcccacgactagaactgtcaatgatcagggggccttacctggcatggtgtggcaagatcgtgacgtgtaccttcaaggacctatctgggcaaagattcctcacacggatggacactttcatccttctcctctgatgggaggctttggactgaaacatccgcctcctcaaatcatgatcaaaaatactccggtaccggcaaatcctccgacgactttcagcccggccaagtttgcttcatttatcactcagtactccactggacaggtcagcgtggaaattgagtgggagctacagaaagaaaacagcaaacgttggaatccagagattcagtacacttccaactacaacaagtctgttaatgtggactttactgtagacactaatggtgtttatagtgaacctcgccccattggcacccgttaccttacccgtcccctgtaa

SEQ ID NO: 5192 - protein, 736 aa, Artificial Sequence
  Description of Artificial Sequence: Synthetic polypeptide
MAADGYLPDWLEDNLSEGIREWWALQPGAPKPKANQQHQDNARGLVLPGYKYLGPGNGLDKGEPVNAADAAALEHDKAYDQQLKAGDNPYLKYNHADAEFQERLKEDTSFGGNLGRAVFQAKKRLLEPLGLVEEAAKTAPGKKRPVDQSPQEPDSSSGVGKSGKQPARKRLNFGQTGDSESVPDPQPLGEPPAAPTSLGSNTMASGGGAPMADNNEGADGVGNSSGNWHCDSQWLGDRVITTSTRTWALPTYNNHLYKQISSQSGASNDNHYFGYSTPWGYFDFNRFHCHFSPRDWQRLINNNWGFRPKKLSFKLFNIQVKEVTQNDGTTTIANNLTSTVQVFTDSEYQLPYVLGSAHQGCLPPFPADVFMVPQYGYLTLNNGSQAVGRSSFYCLEYFPSQMLRTGNNFQFSYTFEDVPFHSSYAHSQSLDRLMNPLIDQYLYYLNRTQGTTSGTTNQSRLLFSQAGPQSMSLQARNWLPGPCYRQQRLSKTANDNNNSNFPWTAASKYHLNGRDSLVNPGPAMASHKDDEEKFFPMHGNLIFGKEGTTASNAELDNVMITDEEEIRTTNPVATEQYGTVANNLQSSNTAPTTRTVNDQGALPGMVWQDRDVYLQGPIWAKIPHTDGHFHPSPLMGGFGLKHPPPQIMIKNTPVPANPPTTFSPAKFASFITQYSTGQVSVEIEWELQKENSKRWNPEIQYTSNYNKSVNVDFTVDTNGVYSEPRPIGTRYLTRPL

SEQ ID NO: 5193 - DNA, 2211 bp, Artificial Sequence
  Description of Artificial Sequence: Synthetic polynucleotide
atggctgccgatggttatcttccagattggctcgaggacaaccttagtgaaggaattcgcgagtggtgggctttgaaacctggagcccctcaacccaaggcaaatcaacaacatcaagacaacgctcgaggtcttgtgcttccgggttacaaataccttggacccggcaacggactcgacaagggggagccggtcaacgcagcagacgcggcggccctcgagcacgacaaggcctacgaccagcagctcaaggccggagacaacccgtacctcaagtacaaccacgccgacgccgagttccaggagcggctcaaagaagatacgtcttttgggggcaacctcgggcgagcagtcttccaggccaaaaagaggcttcttgaacctcttggtctggttgaggaagcggctaagacggctcctggaaagaagagaccggtagagccatcaccccagcgttctccagactcctctacgggcatcggcaagaaaggccaacagcccgctaaaaagagactcaattttggtcagactggcgactcagagtcagtccccgacccacaacctctcggagaacctccagcaacccccgctgctgtgggacctactacaatggcttcaggcggtggcgcaccaatggcagacaataacgagggtgccgatggagtgggtaattcctcaggaaattggcattgcgattcccaatggctgggcgacagagtcatcaccaccagcaccagaacctgggccctgcccacttacaacaaccatctctacaagcaaatctccagccaatcaggagcttcaaacgacaaccactactttggctacagcaccccttgggggtattttgactttaacagattccactgccacttttcaccacgtgactggcaaagactcatcaacaacaactggggattccgacccaagagactcaacttcaagctcttcaacatccaagtcaaggaggtcacgacgaatgatggcgtcacgaccatcgctaataaccttaccagcacggttcaagtcttctcggactcggagtaccagttgccgtacgtcctcggctctgcgcaccagggctgcctccctccgttcccggcggacgtgttcatgattccgcagtacggctacctaacgctcaacaatggcagccaagccgtgggacgttcatccttttactgcctggaatatttcccttctcagatgctgagaacgggcaacaactttaccttcagctacacttttgaggacgttcctttccacagcagctacgctcacagccagagtctggaccgtctcatgaatcctctcatcgaccagtacctgtattacttgagcagaacaaacactccaagtggaaccaccacgcagtcaaggcttcagttttctcaggccggagcgagtgacattcgggaccagtctaggaactggcttcctggaccctgttaccgccagcagcgcgtttctaaaacaaaaacagacaacaacaacagcaattttacctggactggtgcttcaaaatataaccttaatgggcgtgaatctataatcaaccctggcactgctatggcctcacacaaagacgacgaagacaagttctttcccatgagcggtgtcatgatttttggaaaagagagcgccggagcttcaaacactgcattggacaatgtcatgattacagacgaagaggaaattaaagccactaaccctgtggccaccgaaagatttgggaccgtggcagtcaatttccagagcagcagcacagaccctgcgaccggagatgtgcatgttatgggagccttacctggaatggtgtggcaagacagagacgtatacctgcagggtcctatttgggccaaaattcctcacacggatggacactttcacccgtctcctcttatgggcggctttggactcaagaacccgcctcctcagatcctcatcaaaaacacgcctgttcctgcgaatcctccggcggagttttcagctacaaagtttgcttcattcatcacccaatactccacaggacaagtgagtgtggaaattgaatgggagctgcagaaagaaaacagcaagcgctggaatcccgaagtgcagtacacatccaattatgcaaaatctgccaacgttgattttactgtggacaacaatggactttatactgagcctcgccccattggcacccgttaccttacccgtcccctgtaa

SEQ ID NO: 5194 - protein, 736 aa, Artificial Sequence
  Description of Artificial Sequence: Synthetic polypeptide
MAADGYLPDWLEDNLSEGIREWWALKPGAPQPKANQQHQDNARGLVLPGYKYLGPGNGLDKGEPVNAADAAALEHDKAYDQQLKAGDNPYLKYNHADAEFQERLKEDTSFGGNLGRAVFQAKKRLLEPLGLVEEAAKTAPGKKRPVEPSPQRSPDSSTGIGKKGQQPAKKRLNFGQTGDSESVPDPQPLGEPPATPAAVGPTTMASGGGAPMADNNEGADGVGNSSGNWHCDSQWLGDRVITTSTRTWALPTYNNHLYKQISSQSGASNDNHYFGYSTPWGYFDFNRFHCHFSPRDWQRLINNNWGFRPKRLNFKLFNIQVKEVTTNDGVTTIANNLTSTVQVFSDSEYQLPYVLGSAHQGCLPPFPADVFMIPQYGYLTLNNGSQAVGRSSFYCLEYFPSQMLRTGNNFTFSYTFEDVPFHSSYAHSQSLDRLMNPLIDQYLYYLSRTNTPSGTTTQSRLQFSQAGASDIRDQSRNWLPGPCYRQQRVSKTKTDNNNSNFTWTGASKYNLNGRESIINPGTAMASHKDDEDKFFPMSGVMIFGKESAGASNTALDNVMITDEEEIKATNPVATERFGTVAVNFQSSSTDPATGDVHVMGALPGMVWQDRDVYLQGPIWAKIPHTDGHFHPSPLMGGFGLKNPPPQILIKNTPVPANPPAEFSATKFASFITQYSTGQVSVEIEWELQKENSKRWNPEVQYTSNYAKSANVDFTVDNNGLYTEPRPIGTRYLTRPL

SEQ ID NO: 5195 - DNA, 2211 bp, Artificial Sequence
  Description of Artificial Sequence: Synthetic polynucleotide
atggctgccgatggttatcttccagattggctcgaggacaacctctctgagggcattcgcgagtggtgggacttgaaacctggagcccctaaacccaaggcaaatcaacaacatcaggacaacgctcgaggtcttgtgcttccgggttacaaataccttggacccggcaacggactcgacaagggggagccggtcaacgcagcagacgcggcggccctcgagcacgacaaggcctacgaccagcagctcaaggccggagacaacccgtacctcaagtacaaccacgccgacgccgagttccaggagcggctcaaagaagatacgtcttttgggggcaacctcgggcgagcagtcttccaggccaaaaagaggcttcttgaacctcttggtctggttgaggaagcggctaagacggctcctggaaagaagagaccggtagagccatcaccccagcgttctccagactcctctacgggcatcggcaagaaaggccaacagcccgctaaaaagagactcaattttggtcagactggcgactcagagtcagtccccgacccacaacctctcggagaacctccagcaacccccgctgctgtgggacctactacaatggcttcaggcggtggcgcaccaatggcagacaataacgagggtgccgatggagtgggtaattcctcaggaaattggcattgcgattcccaatggctgggcgacagagtcatcaccaccagcaccagaacctgggccctgcccacttacaacaaccatctctacaagcaaatctccagccaatcaggagcttcaaacgacaaccactactttggctacagcaccccttgggggtattttgactttaacagattccactgccacttttcaccacgtgactggcaaagactcatcaacaacaactggggattccgacccaagagactcaacttcaagctcttcaacatccaagtcaaggaggtcacgacgaatgatggcgtcacgaccatcgctaataaccttaccagcacggttcaagtcttctcggactcggagtaccagttgccgtacgtcctcggctctgcgcaccagggctgcctccctccgttcccggcggacgtgttcatgattccgcagtacggctacctaacgctcaacaatggcagccaagccgtgggacgttcatccttttactgcctggaatatttcccttctcagatgctgagaacgggcaacaactttaccttcagctacacttttgaggacgttcctttccacagcagctacgctcacagccagagtctggaccgtctcatgaatcccctcatcgaccagtacctgtattacttgagcagaacaaacactccaagtggaaccaccacgcagtcaaggcttcagttttctcaggccggagcgagtgacattcgggaccagtctaggaactggcttcctggaccctgttaccggcagcagcgcgtttctaaaacaaaaacagacaacaacaacagcaactttacctggactggtgcttcaaaatataaccttaatgggcgtgaatctataatcaaccctggcactgctatggcctcacacaaagacgacgaagacaagttctttcccatgagcggtgtcatgatttttggaaaggagagcgccggagcttcaaacactgcattggacaatgtcatgatcacagacgaagaggaaatcaaagccactaaccccgtggccaccgaaagatttgggactgtggcagtcaatctccagagcagcagcacagaccctgcgaccggagatgtgcatgttatgggagccttacctggaatggtgtggcaagacagagacgtgtacctgcagggtcctatttgggccaaaattcctcacacggatggacactttcacccgtctcctctcatgggcggctttggacttaagcacccgcctcctcagatcctcatcaaaaacacgcctgttcctgcgaatcctccggcagagttttcggctacaaagtttgcttcattcatcacccagtattccacaggacaagtgagtgtggaaattgaatgggagctgcagaaagaaaacagcaagcgctggaatcccgaagtgcagtacacatccaattatgcaaaatctgccaacgttgattttactgtggacaacaatggactttatactgagcctcgccccattggcacccgttacctcacccgtcccctgtaa

SEQ ID NO: 5196 - protein, 736 aa, Artificial Sequence
  Description of Artificial Sequence: Synthetic polypeptide
MAADGYLPDWLEDNLSEGIREWWDLKPGAPKPKANQQHQDNARGLVLPGYKYLGPGNGLDKGEPVNAADAAALEHDKAYDQQLKAGDNPYLKYNHADAEFQERLKEDTSFGGNLGRAVFQAKKRLLEPLGLVEEAAKTAPGKKRPVEPSPQRSPDSSTGIGKKGQQPAKKRLNFGQTGDSESVPDPQPLGEPPATPAAVGPTTMASGGGAPMADNNEGADGVGNSSGNWHCDSQWLGDRVITTSTRTWALPTYNNHLYKQISSQSGASNDNHYFGYSTPWGYFDFNRFHCHFSPRDWQRLINNNWGFRPKRLNFKLFNIQVKEVTTNDGVTTIANNLTSTVQVFSDSEYQLPYVLGSAHQGCLPPFPADVFMIPQYGYLTLNNGSQAVGRSSFYCLEYFPSQMLRTGNNFTFSYTFEDVPFHSSYAHSQSLDRLMNPLIDQYLYYLSRTNTPSGTTTQSRLQFSQAGASDIRDQSRNWLPGPCYRQQRVSKTKTDNNNSNFTWTGASKYNLNGRESIINPGTAMASHKDDEDKFFPMSGVMIFGKESAGASNTALDNVMITDEEEIKATNPVATERFGTVAVNLQSSSTDPATGDVHVMGALPGMVWQDRDVYLQGPIWAKIPHTDGHFHPSPLMGGFGLKHPPPQILIKNTPVPANPPAEFSATKFASFITQYSTGQVSVEIEWELQKENSKRWNPEVQYTSNYAKSANVDFTVDNNGLYTEPRPIGTRYLTRPL

SEQ ID NO: 5197 - DNA, 2214 bp, Artificial Sequence
  Description of Artificial Sequence: Synthetic polynucleotide
atggctgccgatggttatcttccagattggctcgaggacaaccttagtgaaggaattcgcgagtggtgggctttgaaacctggagcccctcaacccaaggcaaatcaacaacatcaagacaacgctcgaggtcttgtgcttccgggttacaaataccttggacccggcaacggactcgacaagggggagccggtcaacgcagcagacgcggcggccctcgagcacgacaaggcctacgaccagcagctgcaggcgggtgacaatccgtacctgcggtataaccacgccgacgccgagtttcaggagcgtctgcaagaagatacgtcttttgggggcaaccttggcagagcagtcttccaggccaaaaagaggatccttgagcctcttggtctggttgaggaagcagctaaaacggctcctggaaagaagaggcctgtagatcagtctcctcaggaaccggactcatcatctggtgttggcaaatcgggcaaacagcctgccagaaaaagactaaatttcggtcagactggcgactcagagtcagtcccagaccctcaacctctcggagaaccaccagcagcccccacaagtttgggatctaatacaatggcttcaggcggtggcgcaccaatggcagacaataacgagggtgccgatggggtgggtagttcctcgggaaattggcattgcgattcccaatgactgggggacagagtcatcaccaccagcacccgaacctgggccctgcccacctacaacaatcacctctacaagcaaatctccaacgggacatcgggaggagccaccaacgacaacacctacttcggctacagcaccccctgggggtattttgactttaacagattccactgccacttttcaccacgtgactggcagcgactcatcaacaacaactggggattccggcccaagagactcagcttcaagctcttcaacatccaggtcaaggaggtcacgcagaatgaaggcaccaagaccatcgccaataacctcaccagcaccatccaggtgtttacggactcggagtaccagctgccgtacgttctcggctctgcgcaccagggctgcctccctccgttcccggcggacgtgttcatgattccgcaatacggctacctgacgctcaacaatggcagccaagccgtgggacgttcatccttttactgcctggaatatttcccttctcagatgctgagaacgggcaacaactttaccttcagctacacctttgaggaagtgcctttccacagcagctacgcgcacagccagagcttggaccggctgatgaatcctctgattgaccagtacctgtactacttgtctcggactcaaacaacaggaggcacggcaaatacgcagactctgggcttcagccaaggtgggcctaatacaatggccaatcaggcaaagaactggctgccaggaccctgttaccgccaacaacgcgtctcaacgacaaccgggcaaaacaacaatagcaactttgcctggactgctgggaccaaataccatctgaatggaagaaattcattggctaatcctggcatcgctatggcaacacacaaagacgacgaggagcgtttttttcccagtaacgggatcctgatttttggcaaacaaaatgctgccagagacaatgcggattacagcgatgtcatgctcaccagcgaggaagaaatcaaaaccactaaccctgtggctacagaggaatacggtatcgtggcagataacttgcagcagcaaaacacggctcctcaaattggaactgtcaacagccagggggccttacccggtatggtctggcagaaccgggacgtgtacctgcagggtcccatctgggccaagattcctcacacggacggcaacttccacccgtctccgctgatgggcggctttggcctgaaacatcctccgcctcagatcctgatcaagaacacgcctgtacctgcggatcctccgaccaccttcaaccagtcaaagctgaactctttcatcacgcaatacagcaccggacaggtcagcgtggagatcgagtgggagctgcagaaggaaaacagcaagcgctggaacccggagatccagtacacttccaactattacaagtctaataatgttgaatttgctgttaatactgaaggtgtatatagtgaaccccgccccattggcaccagatacctgactcgtaatctgtaa

SEQ ID NO: 5198 - protein, 736 aa, Artificial Sequence
  Description of Artificial Sequence: Synthetic polypeptide
MAADGYLPDWLEDNLSEGIREWWALKPGAPQPKANQQHQDNARGLVLPGYKYLGPGNGLDKGEPVNAADAAALEHDKAYDQQLQAGDNPYLRYNHADAEFQERLQEDTSFGGNLGRAVFQAKKRILEPLGLVEEAAKTAPGKKRPVDQSPQEPDSSSGVGKSGKQPARKRLNFGQTGDSESVPDPQPLGEPPAAPTSLGSNTMASGGGAPMADNNEGADGVGSSSGNWHCDSQLGDRVITTSTRTWALPTYNNHLYKQISNGTSGGATNDNTYFGYSTPWGYFDFNRFHCHFSPRDWQRLINNNWGFRPKRLSFKLFNIQVKEVTQNEGTKTIANNLTSTIQVFTDSEYQLPYVLGSAHQGCLPPFPADVFMIPQYGYLTLNNGSQAVGRSSFYCLEYFPSQMLRTGNNFTFSYTFEEVPFHSSYAHSQSLDRLMNPLIDQYLYYLSRTQTTGGTANTQTLGFSQGGPNTMANQAKNWLPGPCYRQQRVSTTTGQNNNSNFAWTAGTKYHLNGRNSLANPGIAMATHKDDEERFFPSNGILIFGKQNAARDNADYSDVMLTSEEEIKTTNPVATEEYGIVADNLQQQNTAPQIGTVNSQGALPGMVWQNRDVYLQGPIWAKIPHTDGNFHPSPLMGGFGLKHPPPQILIKNTPVPADPPTTFNQSKLNSFITQYSTGQVSVEIEWELQKENSKRWNPEIQYTSNYYKSNNVEFAVNTEGVYSEPRPIGTRYLTRNL

SEQ ID NO: 5199 - DNA, 2214 bp, Artificial Sequence
  Description of Artificial Sequence: Synthetic polynucleotide
atggctgccgatggttatcttccagattggctcgaggacaaccttagtgaaggaattcgcgagtggtgggctttgaaacctggagcccctcaacccaaggcaaatcaacaacatcaagacaacgctcgaggtcttgtgcttccgggttacaaataccttggacccggcaacggactcgacaagggggagccggtcaacgcagcagacgcggcggccctcgagcacgacaaggcctacgaccagcagctgcaggcgggtgacaatccgtacctgcggtataaccacgccgacgccgagtttcaggagcgtctgcaagaagatacgtcttttgggggcaaccttggcagagcagtcttccaggccaaaaagaggatccttgagcctcttggtctggttgaggaagcagctaaaacggctcctggaaagaagaggcctgtagatcagtctcctcaggaaccggactcatcatctggtgttggcaaatcgggcaaacagcctgccagaaaaagactaaatttcggtcagactggcgactcagagtcagtcccagaccctcaacctctcggagaaccaccagcagcccccacaagtttgggatctaatacaatggcttcaggcggtggcgcaccaatggcagacaataacgagggtgccgatggggtgggtagttcctcgggaaattggcattgcgattcccaatggctgggggacagagtcatcaccaccagcacccgaacctgggccctgcccacctacaacaatcacctctacaagcaaatctccaacgggacatcgggaggagccaccaacgacaacacctacttcggctacagcaccccctgggggtattttgactttaacagattccactgccacttttcaccacgtgactggcagcgactcatcaacaacaactggggattccggcccaagagactcagcttcaagctcttcaacatccaggtcaaggaggtcacgcagaatgaaggcaccaagaccatcgccaataacctcaccagcaccatccaggtgtttacggactcggagtaccagctgccgtacgttctcggctctgcgcaccagggctgcctccctccgttcccggcggacgtgttcatgattccgcaatacggctacctgacgctcaacaatggcagccaagccgtgggacgttcatccttttactgcctggaatatttcccttctcagatgctgagaacgggcaacaactttaccttcagctacacctttgaggaagtgccttttcacagcagctacgcgcacagccagagcttggaccggctgatgaatcctctgattgaccagtacctgtactacttgtctcggactcaaacaacaggaggcacggcaaatacgcagactctgggcttcagccaaggtgggcctaatacaatggccaatcaggcaaagaactggctgccaggaccctgttaccgccaacaacgcgtctcaacgacaaccgggcaaaacaacaatagcaactttgcctggactgctgggaccaaataccatctgaatggaagaaattcattggctaatcctggcatcgctatggcaacacacaaagacgacgaggagcgtttttttcccagtaacgggatcctgatttttggcaaacaaaatgctgccagagacaatgcggattacagcgatgtcatgctcaccagcgaggaagaaatcaaaaccactaaccctgtggctacagaggaatacggtatcgtggcagataacttgcagcagcaaaacacggctcctcaaattggaactgtcaacagccagggggccttacccggtatggtctggcagaaccgggacgtgtacctgcagggtcccatctgggccaagattcctcacacggacggcaacttccacccgtctccgctgatgggcggctttggcctgaaacatcctccgcctcagatcctgatcaagaacacgcctgtacctgcggatcctccgaccaccttcaaccagtcaaagctgaactctttcatcacgcaatacagcaccggacaggtcagcgtggagatcgagtgggagctgcagaaggaaaacagcaagcgctggaacccggagatccagtacacttccaactattacaagtctaataatgttgaatttgctgttaatactgaaggtgtatatagtgaaccccgccccattggcaccagatacctgactcgtaatctgtaa

SEQ ID NO: 5200 - protein, 737 aa, Artificial Sequence; identical to SEQ ID NO: 5188
  Description of Artificial Sequence: Synthetic polypeptide

SEQ ID NO: 5201 - DNA, 2211 bp, Artificial Sequence
  Description of Artificial Sequence: Synthetic polynucleotide
atggctgccgatggttatcttccagattggctcgaggacaacctctctgagggcattcgcgagtggtgggacttgaaacctggagcccctaaacccaaggcaaatcaacaacatcaggacaacgctcgaggtcttgtgcttccgggttacaaataccttggacccggcaacggactcgacaagggggagccggtcaacgcagcagacgcggcggccctcgagcacgacaaggcctacgaccagcagctcaaggccggagacaacccgtacctcaagtacaaccacgccgacgccgagttccaggagcggctcaaagaagatacgtcttttgggggcaacctcgggcgagcagtcttccaggccaaaaagaggcttcttgaacctcttggtctggttgaggaagcggctaagacggctcctggaaagaagagaccggtagagccatcaccccagcgttctccagactcctctacgggcatcggcaagaaaggccaacagcccgctaaaaagagactcaattttggtcagactggcgactcagagtcagtccccgacccacaacctctcggagaacctccagcaacccccgctgctgtgggacctactacaatggcttcaggcggtggcgcaccaatggcagacaataacgagggtgccgatggagtgggtaattcctcaggaaattggcattgcgattcccaatggctgggcgacagagtcatcaccaccagcaccagaacctgggccctgcccacttacaacaaccatctctacaagcaaatctccagccaatcaggagcttcaaacgacaaccactactttggctacagcaccccttgggggtattttgactttaacagattccactgccacttttcaccacgtgactggcaaagactcatcaacaacaactggggattccgacccaagagactcaacttcaagctcttcaacatccaagtcaaggaggtcacgacgaatgatggcgtcacgaccatcgctaataaccttaccagcacggttcaagtcttctcggactcggagtaccagttgccgtacgtcctcggctctgcgcaccagggctgcctccctccgttcccggcggacgtgttcatgattccgcagtacggctacctaacgctcaacaatggcagccaagccgtgggacgttcatccttttactgcctggaatatttcccttctcagatgctgagaacgggcaacaactttaccttcagctacacttttgaggacgttcctttccacagcagctacgctcacagccagagtctggaccgtctcatgaatcctctcatcgaccagtacctgtattacttgagcagaacaaacactccaagtggaaccaccacgcagtcaaggcttcagttttctcaggccggagcgagtgacattcgggaccagtctaggaactggcttcctggaccctgttaccgccagcagcgcgtttctaaaacaaaaacagacaacaacaacagcaattttacctggactggtgcttcaaaatataaccttaatgggcgtgaatctataatcaaccctggcactgctatggcctcacacaaagacgacgaagacaagttctttcccatgagcggtgtcatgatttttggaaaagagagcgccggagcttcaaacactgcattggacaatgtcatgattacagacgaagaggaaattaaagccactaaccctgtggccaccgaaagatttgggaccgtggcagtcaatttccagagcagcagcacagaccctgcgaccggagatgtgcatgctatgggagcattacctggcatggtgtggcaagatagagacgtgtacctgcagggtcccatttgggccaaaattcctcacacagatggacactttcacccgtctcctcttatgggcggctttggactcaagaacccgcctcctcagatcctcatcaaaaacacgcctgttcctgcgaatcctccggcggagttttcagctacaaagtttgcttcattcatcacccaatactccacaggacaagtgagtgtggaaattgaatgggagctgcagaaagaaaacagcaagcgctggaatcccgaagtgcagtacacatccaattatgcaaaatctgccaacgttgattttactgtggacaacaatggactttatactgagcctcgccccattggcacccgttaccttacccgtcccctgtaa

SEQ ID NO: 5202 - protein, 736 aa, Artificial Sequence
  Description of Artificial Sequence: Synthetic polypeptide
MAADGYLPDWLEDNLSEGIREWWDLKPGAPKPKANQQHQDNARGLVLPGYKYLGPGNGLDKGEPVNAADAAALEHDKAYDQQLKAGDNPYLKYNHADAEFQERLKEDTSFGGNLGRAVFQAKKRLLEPLGLVEEAAKTAPGKKRPVEPSPQRSPDSSTGIGKKGQQPAKKRLNFGQTGDSESVPDPQPLGEPPATPAAVGPTTMASGGGAPMADNNEGADGVGNSSGNWHCDSQWLGDRVITTSTRTWALPTYNNHLYKQISSQSGASNDNHYFGYSTPWGYFDFNRFHCHFSPRDWQRLINNNWGFRPKRLNFKLFNIQVKEVTTNDGVTTIANNLTSTVQVFSDSEYQLPYVLGSAHQGCLPPFPADVFMIPQYGYLTLNNGSQAVGRSSFYCLEYFPSQMLRTGNNFTFSYTFEDVPFHSSYAHSQSLDRLMNPLIDQYLYYLSRTNTPSGTTTQSRLQFSQAGASDIRDQSRNWLPGPCYRQQRVSKTKTDNNNSNFTWTGASKYNLNGRESIINPGTAMASHKDDEDKFFPMSGVMIFGKESAGASNTALDNVMITDEEEIKATNPVATERFGTVAVNFQSSSTDPATGDVHAMGALPGMVWQDRDVYLQGPIWAKIPHTDGHFHPSPLMGGFGLKNPPPQILIKNTPVPANPPAEFSATKFASFITQYSTGQVSVEIEWELQKENSKRWNPEVQYTSNYAKSANVDFTVDNNGLYTEPRPIGTRYLTRPL

SEQ ID NO: 5203 - DNA, 2211 bp, Artificial Sequence
  Description of Artificial Sequence: Synthetic polynucleotide
atggctgccgatggttatcttccagattggctcgaggacaaccttagtgaaggaattcgcgagtggtgggcgctgaaacctggagccccgaagcccaaagccaaccagcaaaagcaggacgacggccggggtctggtgcttccgggttacaaatacctcggacccggtaacggactcgacaaaggagagccggtcaacgaggcggacgcggcagccctcgagcacgacaaggcctacgaccagcagctcaaagcgggtgacaatccgtacctgcggtataaccacgccgacgccgagtttcaggagcgtctgcaagaagatacgtcttttgggggcaacctcgggcgagcagtcttccaggccaagaagcgggttctcgaacctctcggtctggttgaggaaggcgctaagacggctcccggaaagaaacgtccggtagagcagtcgccacaagagccagactcctctacgggcatcggcaagaaaggccaacagcccgccagaaaaagactcaatttcggtcagactggcgactcagagtcagttccagaccctcaacctctcggagaacctccagcagcgccctctggtgtgggacctactacaatggcttcaggcggtggcgcaccaatggcagacaataacgaaggcgccgacggagtgggtaatgcctcaggaaattggcattgcgattccacatggctgggcgacagagtcatcaccaccagcacccgaacatgggccttgcccacctataacaaccacctctacaagcaaatctccagtgcttcaacgggggccagcaacgacaacacctacttcggctacagcaccccctgggggtattttgatttcaacagattccactgccatttctcaccacgtgactggcagcgactcatcaacaacaattggggattccggcccaagagactcaacttcaaactcttcaacatccaagtcaaggaggtcacgacgaatgatggcgtcacgaccatcgctaataaccttaccagcacggttcaagtcttctcggactcggagtaccagttgccgtacgtcctcggctctgcgcaccagggctgcctccctccgttcccggcggacgtgttcatgattccgcagtacggctacctaacgctcaacaatggcagccaggcagtgggacggtcatccttttactgcctggaatatttcccatcgcagatgctgagaacgggcaataactttaccttcagctacaccttcgaggacgtgcctttccacagcagctacgcgcacagccagagcctggaccggctgatgaatcctctcatcgaccagtacctgtattacctgaacagaactcagaatcagtccggaagtgcccaaaacaaggacttgctgtttagccgggggtctccagctggcatgtctgttcagcccaaaaactggctacctggaccctgttatcggcagcagcgcgtttctaaaacaaaaacagacaacaacaacagcaattttacctggactggtgcttcaaaatataacctcaatgggcgtgaatccatcatcaaccctggcactgctatggcctcacacaaagacgacgaagacaagttctttcccatgagcggtgtcatgatttttggaaaagagagcgccggagcttcaaacactgcattggacaatgtcatgattacagacgaagaggaaattaaagccactaaccctgtggccaccgaaagatttgggaccgtggcagtcaatttccagagcagcagcacagaccctgcgaccggagatgtgcatgttatgggagccttacctggaatggtgtggcaagacagagacgtatacctgcagggtcctatttgggccaaaattcctcacacagatggacactttcacccgtctcctcttatgggcggctttggactcaagaacccgcctcctcagatcctcatcaaaaacacgcctgttcctgcgaatcctccggcagagttttcggctacaaagtttgcttcattcatcacccagtattccacaggacaagtgagcgtggagattgaatgggagctgcagaaagaaaacagcaaacgctggaatcccgaagtgcagtatacatctaactatgcaaaatctgccaacgttgatttcactgtggacaacaatggactttatactgagcctcgccccattggcacccgttacctcacccgtcccctgtaa

SEQ ID NO: 5204 - protein, 736 aa, Artificial Sequence
  Description of Artificial Sequence: Synthetic polypeptide
MAADGYLPDWLEDNLSEGIREWWALKPGAPKPKANQQKQDDGRGLVLPGYKYLGPGNGLDKGEPVNEADAAALEHDKAYDQQLKAGDNPYLRYNHADAEFQERLQEDTSFGGNLGRAVFQAKKRVLEPLGLVEEGAKTAPGKKRPVEQSPQEPDSSTGIGKKGQQPARKRLNFGQTGDSESVPDPQPLGEPPAAPSGVGPTTMASGGGAPMADNNEGADGVGNASGNWHCDSTWLGDRVITTSTRTWALPTYNNHLYKQISSASTGASNDNTYFGYSTPWGYFDFNRFHCHFSPRDWQRLINNNWGFRPKRLNFKLFNIQVKEVTTNDGVTTIANNLTSTVQVFSDSEYQLPYVLGSAHQGCLPPFPADVFMIPQYGYLTLNNGSQAVGRSSFYCLEYFPSQMLRTGNNFTFSYTFEDVPFHSSYAHSQSLDRLMNPLIDQYLYYLNRTQNQSGSAQNKDLLFSRGSPAGMSVQPKNWLPGPCYRQQRVSKTKTDNNNSNFTWTGASKYNLNGRESIINPGTAMASHKDDEDKFFPMSGVMIFGKESAGASNTALDNVMITDEEEIKATNPVATERFGTVAVNFQSSSTDPATGDVHVMGALPGMVWQDRDVYLQGPIWAKIPHTDGHFHPSPLMGGFGLKNPPPQILIKNTPVPANPPAEFSATKFASFITQYSTGQVSVEIEWELQKENSKRWNPEVQYTSNYAKSANVDFTVDNNGLYTEPRPIGTRYLTRPL

SEQ ID NO: 5205 - DNA, 2205 bp, Artificial Sequence
  Description of Artificial Sequence: Synthetic polynucleotide
atggctgctgacggttatcttccagattggctcgaggacaacctttctgaaggcattcgtgagtggtgggctctgaaacctggagtccctcaacccaaagcgaaccaacaacaccaggacaaccgtcggggtcttgtgcttccgggttacaaatacctcggacccggtaacggactcgacaaaggagagccggtcaacgaggcggacgcggcagccctcgaacacgacaaggcctacgaccagcagctcaaggccggagacaacccgtacctcaagtacaaccacgccgacgccgagttccaggagcggctcaaagaagatacgtcttttgggggcaacctcgggcgagcagtcttccaggccaaaaagaggcttcttgaacctcttggtctggttgaggaagcggctaagacggctcctggaaagaagaggcctgtagagcagtctcctcaggaaccggactcctccgcgggtattggcaaatcgggtgcacagcccgctaaaaagagactcaatttcggtcagactggcgacacagagtcagtcccagaccctcaaccaatcggagaacctcccgcagccccctcaggtgtgggatctcttacaatggcttcaggtggtggcgcaccagtggcagacaataacgaaggtgccgatggagtgggtagttcctcgggaaattggcattgcgattcccaatggctgggggacagagtcatcaccaccagcacccgaacctgggccctgcccacctacaacaaccacctctacaaacaaatttccagccaatcaggagcctcgaacgacaatcactactttggctacagcaccccttgggggtattttgacttcaacagattccactgccacttttcaccacgtgactggcagcgactcatcaacaacaactggggattccggcccaagagactcagcttcaagctcttcaacatccaggtcaaagaggttacggacaacaatggagtcaagaccatcgccaataaccttaccagcacggtccaggtcttcacggactcagactatcagctcccgtacgtgctcgggtcggctcacgagggctgcctcccgccgttcccagcggacgttttcatgattcctcagtacgggtatctgacgcttaatgatggaagccaggccgtgggtcgttcgtccttttactgcctggaatatttcccgtcgcaaatgctaagaacgggtaacaacttccagttcagctacgagtttgagaacgtacctttccatagcagctacgctcacagccaaagcctggaccgactaatgaatccactcatcgaccaatacttgtactatctctcaaagactattaacggttctggacagaatcaacaaacgctaaaattcagtgtggccggacccagcaacatggctgtccagggaagaaactacatacctggacccagctaccgacaacaacgtgtctcaaccactgtgactcaaaacaacaacagcgaatttgcttggcctggagcttcttcttgggctctcaatggacgtaatagcttgatgaatcctggacctgctatggccagccacaaagaaggagaggaccgtttctttcctttgtctggatctttaatttttggcaaacaaggaactggaagagacaacgtggatgcggacaaagtcatgataaccaacgaagaagaaattaaaactactaacccggtagcaacggagtcctatggacaagtggccacaaaccaccagagtgcccaagcacaggcgcagaccggctgggttcaaaaccaaggaatacttccgggtatggtttggcaggacagagatgtgtacctgcaaggacccatctgggccaagattcctcacacggacggcaacttccacccgtctccgctgatgggcggctttggcctgaaacatcctccgcctcagatcctgatcaagaacacgcctgtacctgcggatcctccgaccaccttcaaccagtcaaagctgaactctttcatcacgcaatacagcaccggacaggtcagcgtggaaattgaatgggagctgcagaaggaaaacagcaagcgctggaatcccgaagtgcagtatacatctaactatgcaaaatctgccaacgttgatttcactgtggacaacaatggactttatactgagcctcgccccattggcacccgttacctcacccgtcccctgtaa

SEQ ID NO: 5206 - protein, 734 aa, Artificial Sequence
  Description of Artificial Sequence: Synthetic polypeptide
MAADGYLPDWLEDNLSEGIREWWALKPGVPQPKANQQHQDNRRGLVLPGYKYLGPGNGLDKGEPVNEADAAALEHDKAYDQQLKAGDNPYLKYNHADAEFQERLKEDTSFGGNLGRAVFQAKKRLLEPLGLVEEAAKTAPGKKRPVEQSPQEPDSSAGIGKSGAQPAKKRLNFGQTGDTESVPDPQPIGEPPAAPSGVGSLTMASGGGAPVADNNEGADGVGSSSGNWHCDSQWLGDRVITTSTRTWALPTYNNHLYKQISSQSGASNDNHYFGYSTPWGYFDFNRFHCHFSPRDWQRLINNNWGFRPKRLSFKLFNIQVKEVTDNNGVKTIANNLTSTVQVFTDSDYQLPYVLGSAHEGCLPPFPADVFMIPQYGYLTLNDGSQAVGRSSFYCLEYFPSQMLRTGNNFQFSYEFENVPFHSSYAHSQSLDRLMNPLIDQYLYYLSKTINGSGQNQQTLKFSVAGPSNMAVQGRNYIPGPSYRQQRVSTTVTQNNNSEFAWPGASSWALNGRNSLMNPGPAMASHKEGEDRFFPLSGSLIFGKQGTGRDNVDADKVMITNEEEIKTTNPVATESYGQVATNHQSAQAQAQTGWVQNQGILPGMVWQDRDVYLQGPIWAKIPHTDGNFHPSPLMGGFGLKHPPPQILIKNTPVPADPPTTFNQSKLNSFITQYSTGQVSVEIEWELQKENSKRWNPEVQYTSNYAKSANVDFTVDNNGLYTEPRPIGTRYLTRPL

SEQ ID NO: 5207 - DNA, 2211 bp, Artificial Sequence
  Description of Artificial Sequence: Synthetic polynucleotide
atggctgccgatggttatcttccagattggctcgaggacaacctctctgagggcattcgcgagtggtgggcgctgaaacctggagccccgaagcccaaagccaaccagcaaaagcaggacgacggccggggtctggtgcttcctggctacaagtacctcggacccttcaacggactcgacaagggggagcccgtcaacgcggcggacgcagcggccctcgagcacgacaaggcctacgaccagcagctgcaggcgggtgacaatccgtacctgcggtataaccacgccgacgccgagtttcaggagcgtctgcaagaagatacgtcttttgggggcaacctcgggcgagcagtcttccaggccaagaagtgggttctcgaacctctcggtctggttgaggaaggcgctaagacggctcctggaaagaaacgtccggtagagcagtcgccacaagagccagactcctcctcgggcatcggcaagacaggccagcagcccgctaaaaagagactcaattttggtcagactggcgactcagagtcagtccccgacccacaacctctcggagaacctccagcaacccccgctgctgtgggacctactacaatggcttcaggcggtggcgcaccaatggcagacaataacgaaggcgccgacggagtgggtaatgcctcaggaaattggcattgcgattccacatggctgggcgacagagtcatcaccaccagcacccgcacctgggccttgcccacctacaataaccacctctacaagcaaatctccagtgcttcaacgggggccagcaacgacaaccactacttcggctacagcaccccctgggggtattttgatttcaacagattccactgccatttctcaccacgtgactggcagcgactcatcaacaacaattggggattccggcccaagagactcaacttcaagctcttcaacatccaagtcaaggaggtcacgacgaatgatggcgtcacaaccatcgctaataaccttaccagcacggttcaagtcttctcggactcggagtaccagcttccgtacgtcctcggctctgcgcaccagggctgcctccctccgttcccggcggacgtgttcatgattccgcaatacggctacctgacgctcaacaatggcagccaagccgtgggacgttcatccttttactgcctggaatatttcccttctcagatgctgagaacgggcaacaactttaccttcagctacacctttgaggaagtgcctttccacagcagctacgcgcacagccagagcctggaccggctgatgaatcctctcatcgaccaatacctgtattacctgaacagaactcaaaatcagtccggaagtgcccaaaacaaggacttgctgtttagccgtgggtctccagctggcatgtctgttcagcccaaaaactggctacctggaccctgttatcggcagcagcgcgtttctaaaacaaaaacagacaacaacaacagcaattttacctggactggtgcttcaaaatataacctcaatgggcgtgaatccatcatcaaccctggcactgctatggcctcacacaaagacgacgaagacaagttctttcccatgagcggtgtcatgatttttggaaaggagagcgccggagcttcaaacactgcattggacaatgtcatgatcaccgacgaagaggaaatcaaagccactaaccccgtggccaccgaaagatttgggactgtggcagtcaatctccagagcagcagcacagaccctgcgaccggagatgtgcatgttatgggagccttacctggcatggtgtggcaagatagagacgtgtacctgcagggtcccatttgggccaaaattcctcacacagatggacactttcacccgtctcctcttatgggcggctttggactcaagaacccgcctcctcagatcctcatcaaaaacacgcctgttcctgcgaatcctccggcggagttttcagctacaaagtttgcttcattcatcacccaatactccacaggacaagtgagtgtggaaattgaatgggagctgcagaaagaaaacagcaagcgctggaatcccgaagtgcagtacacatccaattatgcaaaatctgccaacgttgattttactgtggacaacaatggactttatactgagcctcgccccattggcacccgttacctcacccgtcccctgtaa

SEQ ID NO: 5208 - protein, 736 aa, Artificial Sequence
  Description of Artificial Sequence: Synthetic polypeptide
MAADGYLPDWLEDNLSEGIREWWALKPGAPKPKANQQKQDDGRGLVLPGYKYLGPFNGLDKGEPVNAADAAALEHDKAYDQQLQAGDNPYLRYNHADAEFQERLQEDTSFGGNLGRAVFQAKKWVLEPLGLVEEGAKTAPGKKRPVEQSPQEPDSSSGIGKTGQQPAKKRLNFGQTGDSESVPDPQPLGEPPATPAAVGPTTMASGGGAPMADNNEGADGVGNASGNWHCDSTWLGDRVITTSTRTWALPTYNNHLYKQISSASTGASNDNHYFGYSTPWGYFDFNRFHCHFSPRDWQRLINNNWGFRPKRLNFKLFNIQVKEVTTNDGVTTIANNLTSTVQVFSDSEYQLPYVLGSAHQGCLPPFPADVFMIPQYGYLTLNNGSQAVGRSSFYCLEYFPSQMLRTGNNFTFSYTFEEVPFHSSYAHSQSLDRLMNPLIDQYLYYLNRTQNQSGSAQNKDLLFSRGSPAGMSVQPKNWLPGPCYRQQRVSKTKTDNNNSNFTWTGASKYNLNGRESIINPGTAMASHKDDEDKFFPMSGVMIFGKESAGASNTALDNVMITDEEEIKATNPVATERFGTVAVNLQSSSTDPATGDVHVMGALPGMVWQDRDVYLQGPIWAKIPHTDGHFHPSPLMGGFGLKNPPPQILIKNTPVPANPPAEFSATKFASFITQYSTGQVSVEIEWELQKENSKRWNPEVQYTSNYAKSANVDFTVDNNGLYTEPRPIGTRYLTRPL

SEQ ID NO: 5209 - DNA, 2214 bp, Artificial Sequence
  Description of Artificial Sequence: Synthetic polynucleotide
atggctgccgatggttatcttccagattggctcgaggacaaccttagtgaaggaattcgcgagtggtgggctttgaaacctggagcccctcaacccaaggcaaatcaacaacatcaagacaacgctcgaggtcttgtgcttccgggttacaaataccttggacccggcaacggactcgacaagggggagccggtcaacgcagcagacgcggcggccctcgagcacgacaaggcctacgaccagcagctgcaggcgggtgacaatccgtacctgcggtataaccacgccgacgccgagtttcaggagcgtctgcaagaagatacgtcttttgggggcaaccttggcagagcagtcttccaggccaaaaagaggatccttgagcctcttggtctggttgaggaagcagctaaaacggctcctggaaagaagaggcctgtagatcagtctcctcaggaaccggactcatcatctggtgttggcaaatcgggcaaacagcctgccagaaaaagactaaatttcggtcagactggcgactcagagtcagtcccagaccctcaacctctcggagaaccaccagcagcccccacaagtttgggatctaatacaatggcttcaggcggtggcgcaccaatggcagacaataacgagggtgccgatggggtgggtagttcctcgggaaattggcattgcgattcccaatggctgggggacagagtcatcaccaccagcacccgaacctgggccctgcccacctacaacaatcacctctacaagcaaatctccaacgggacatcgggaggagccaccaacgacaacacctacttcggctacagcaccccctgggggtattttgactttaacagattccactgccacttttcaccacgtgactggcagcgactcatcaacaacaactggggattccggcccaagagactcagcttcaagctcttcaacatccaggtcaaggaggtcacgcagaatgaaggcaccaagaccatcgccaataacctcaccagcaccatccaggtgtttacggactcggagtaccagctgccgtacgttctcggctcggcgcaccagggctgcctccctccgttcccggcggacgtcttcatggtgccacagtatggatacctgacgctcaacaatggcagccaagccgtgggacgttcatccttttactgcctggaatatttcccttctcagatgctgagaacgggcaacaactttaccttcagctacacctttgaggaagtgcctttccacagcagctacgcgcacagccagagcttggaccggctgatgaatcctctgattgaccagtacctgtactacttgtctcggactcaaacaacaggaggcacggcaaatacgcagactctgggcttcagccaaggtgggcctaatacaatggccaatcaggcaaagaactggctgccaggaccctgttaccgccaacaacgcgtctcaacgacaaccgggcaaaacaacaatagcaactttgcctggactgctgggaccaaataccatctgaatggaagaaattcattggctaatcctggcatcgctatggcaacacacaaagacgacgaggagcgtttttttcccagtaacgggatcctgatttttggcaaacaaaatgctgccagagacaatgcggattacagcgatgtcatgctcaccagcgaggaagaaatcaaaaccactaaccctgtggctacagaggaatacggtatcgtggcagataacttgcagcagcaaaacacggctcctcaaattggaactgtcaacagccagggggacttacccggtatggtctggcagaaccgggacgtgtacctgcagggtcccatctgggccaagattcctcacacggacggcaacttccacccgtctccgctgatgggcggctttggcctgaaacatcctccgcctcagatcctgatcaagaacacgcctgtacctgcggatcctccgaccaccttcaaccagtcaaagctgaactctttcatcacgcaatacagcaccggacaggtcagcgtggagatcgagtgggagctgcagaaggaaaacagcaagcgctggaacccggagatccagtacacttccaactattacaagtctaataatgttgaatttgctgttaatactgaaggtgtatatagtgaaccccgccccattggcaccagatacctgactcgtaatctgtaa

SEQ ID NO: 5210 - protein, 737 aa, Artificial Sequence
  Description of Artificial Sequence: Synthetic polypeptide
MAADGYLPDWLEDNLSEGIREWWALKPGAPQPKANQQHQDNARGLVLPGYKYLGPGNGLDKGEPVNAADAAALEHDKAYDQQLQAGDNPYLRYNHADAEFQERLQEDTSFGGNLGRAVFQAKKRILEPLGLVEEAAKTAPGKKRPVDQSPQEPDSSSGVGKSGKQPARKRLNFGQTGDSESVPDPQPLGEPPAAPTSLGSNTMASGGGAPMADNNEGADGVGSSSGNWHCDSQWLGDRVITTSTRTWALPTYNNHLYKQISNGTSGGATNDNTYFGYSTPWGYFDFNRFHCHFSPRDWQRLINNNWGFRPKRLSFKLFNIQVKEVTQNEGTKTIANNLTSTIQVFTDSEYQLPYVLGSAHQGCLPPFPADVFMVPQYGYLTLNNGSQAVGRSSFYCLEYFPSQMLRTGNNFTFSYTFEEVPFHSSYAHSQSLDRLMNPLIDQYLYYLSRTQTTGGTANTQTLGFSQGGPNTMANQAKNWLPGPCYRQQRVSTTTGQNNNSNFAWTAGTKYHLNGRNSLANPGIAMATHKDDEERFFPSNGILIFGKQNAARDNADYSDVMLTSEEEIKTTNPVATEEYGIVADNLQQQNTAPQIGTVNSQGDLPGMVWQNRDVYLQGPIWAKIPHTDGNFHPSPLMGGFGLKHPPPQILIKNTPVPADPPTTFNQSKLNSFITQYSTGQVSVEIEWELQKENSKRWNPEIQYTSNYYKSNNVEFAVNTEGVYSEPRPIGTRYLTRNL

SEQ ID NO: 5211 - DNA, 2205 bp, Artificial Sequence
  Description of Artificial Sequence: Synthetic polynucleotide
atggctgctgacggttatcttccagattggctcgaggacaacctttctgaaggcattcgtgagtggtgggctctgaaacctggagtccctcaacccaaagcgaaccaacaacaccaggacaactgtcggggtcttgtgcttccgggttacaaatacctcggacccggtaacggactcgacaaaggagagccggtcaacgaggcggacgcggcagccctcgaacacgacaaggcctacgaccagcagctcaaggccggagacaacccgtacctcaagtacaaccacgccgacgccgagttccaggagcggctcaaagaagatacgtcttttgggggcaacctcgggcgagcagtcttccagaccaaaaagaggcttcttgaacctcttggtctggttgaggaagcggctaagacggctcctggaaagaagaggcctgtagagcagtctcctcaggaaccggactcctccgcgggtattggcaaatcgggtgcacagcccgctaaaaagagactcaatttcggtcagactggcgacacagagtcagtcccagaccctcaaccaatcggagaacctcccgcagccccctcaggtgtgggatctcttacaatggcttcaggtggtggcgcaccagtggcagacaataacgaaggtgccgatggagtgggtagttcctcgggaaattggcattgcgattcccaatggctgggggacagagtcatcaccaccagcacccgaacctgggccctgcccacctacaacaaccacctctacaaacaaatttccagccaatcaggagcctcgaacgacaatcactactttggctacagcaccccttgggggtattttgacttcaacagattccactgccacttttcaccacgtgactggcagcgactcatcaacaacaactggggattccggcccaagagactcagcttcaagctcttcaacatccaggtcaaagaggttacggacaacaatggagtcaagaccatcgccaataaccttaccagcacggtccaggtcttcacggactcagactatcagctcccgtacgtgctcgggtcggctcacgagggctgcctcccgccgttcccagcggacgttttcatgattcctcagtacgggtatctgacgcttaatgatggaagccaggccgtgggtcgttcgtccttttactgcctggaatatttcccgtcgcaaatgctaagaacgggtaacaacttccagttcagctacgagtttgagaacgtacctttccatagcagctacgctcacagccaaagcctggaccgactaatgaatccactcatcgaccaatacttgtactatctctcaaagactattaacggttctggacagaatcaacaaacgctaaaattcagtgtggccggacccagcaacatggctgtccagggaagaaactacatacctggacccagctaccgacaacaacgtgtctcaaccactgtgactcaaaacaacaacagcgaatttgcttggcctggagcttcttcttgggctctcaatggacgtaatagcttgatgaatcctggacctgctatggccagccacaaagaaggagaggaccgtttctttcctttgtctggatctttaatttttggcaaacaaggaactggaagagacaacgtggatgcggacaaagtcatgataaccaacgaagaagaaattaaaactactaacccggtagcaacggagtcctatggacaagtggccacaaaccaccagagtgcccaagcacaggcgcagaccggctgggttcaaaaccaaggaatacttccgggtatggtttggcaggacagagatgtgtacctgcaaggacccatctgggccaagattcctcacacggacggcaacttccacccgtctccgctgatgggcggctttggcctgaaacatcctccgcctcagatcctgatcaagaacacgcctgttcctgcgaatcctccggcggagttttcagctacaaagtttgcttcattcatcacccagtactccacaggacaagtgagtgtggaaattgaatgggagctgcagaaagaaaacagcaagcgctggaatcccgaagtgcagtacacatccaattatgcaaaatctgccaacgttgattttactgtggacaacaatggactttatactgagcctcgccccattggcacccgttaccttaccaaacctctgtaa

SEQ ID NO: 5212 - protein, 734 aa, Artificial Sequence
  Description of Artificial Sequence: Synthetic polypeptide
MAADGYLPDWLEDNLSEGIREWWALKPGVPQPKANQQHQDNCRGLVLPGYKYLGPGNGLDKGEPVNEADAAALEHDKAYDQQLKAGDNPYLKYNHADAEFQERLKEDTSFGGNLGRAVFQTKKRLLEPLGLVEEAAKTAPGKKRPVEQSPQEPDSSAGIGKSGAQPAKKRLNFGQTGDTESVPDPQPIGEPPAAPSGVGSLTMASGGGAPVADNNEGADGVGSSSGNWHCDSQWLGDRVITTSTRTWALPTYNNHLYKQISSQSGASNDNHYFGYSTPWGYFDFNRFHCHFSPRDWQRLINNNWGFRPKRLSFKLFNIQVKEVTDNNGVKTIANNLTSTVQVFTDSDYQLPYVLGSAHEGCLPPFPADVFMIPQYGYLTLNDGSQAVGRSSFYCLEYFPSQMLRTGNNFQFSYEFENVPFHSSYAHSQSLDRLMNPLIDQYLYYLSKTINGSGQNQQTLKFSVAGPSNMAVQGRNYIPGPSYRQQRVSTTVTQNNNSEFAWPGASSWALNGRNSLMNPGPAMASHKEGEDRFFPLSGSLIFGKQGTGRDNVDADKVMITNEEEIKTTNPVATESYGQVATNHQSAQAQAQTGWVQNQGILPGMVWQDRDVYLQGPIWAKIPHTDGNFHPSPLMGGFGLKHPPPQILIKNTPVPANPPAEFSATKFASFITQYSTGQVSVEIEWELQKENSKRWNPEVQYTSNYAKSANVDFTVDNNGLYTEPRPIGTRYLTKPL

SEQ ID NO: 5213 - DNA, 2211 bp, Artificial Sequence
  Description of Artificial Sequence: Synthetic polynucleotide
atggctgccgatggttatcttccagattggctcgaggacaacctctctgagggcattcgcgagtggtgggacttgaaacctggagcccctaaacccaaggcaaatcaacaacatcaggacaacgctcgaggtcttgtgcttccgggttacaaataccttggacccggcaacggactcgacaagggggagccggtcaacgcagcagacgcggcggccctcgagcacgacaaggcctacgaccagcagctcaaggccggagacaacccgtacctcaagtacaaccacgccgacgccgagttccaggagcggctcaaagaagatacgtcttttgggggcaacctcgggcgagcagtcttccaggccaaaaagaggcttcttgaacctcttggtctggttgaggaagcggctaagacggctcctggaaagaagagaccggtagagccatcaccccagcgttctccagactcctctacgggcatcggcaagaaaggccaacagcccgctaaaaagagactcaattttggtcagactggcgactcagagtcagtccccgacccacaacctctcggagaacctccagcaacccccgctgctgtgggacctactacaatggcttcaggcggtggcgcaccaatggcagacaataacgagggtgccgatggagtgggtaattcctcaggaaattggcattgcgattcccaatggctgggcgacagagtcatcaccaccagcaccagaacctgggccctgcccacttacaacaaccatctctacaagcaaatctccagccaatcaggagcttcaaacgacaaccactactttggctacagcaccccttgggggtattttgactttaacagattccactgccacttttcaccacgtgactggcaaagactcatcaacaacaactggggattccgacccaagagactcaacttcaagctcttcaacatccaagtcaaggaggtcacgacgaatgatggcgtcacgaccatcgctaataaccttaccagcacggttcaagtcttctcggactcggagtaccagttgccgtacgtcctcggctctgcgcaccagggctgcctccctccgttcccggcggacgtgttcatgattccgcagtacggctacctaacgctcaacaatggcagccaagccgtgggacgttcatccttttactgcctggaatatttcccttctcagatgctgagaacgggcaacaactttaccttcagctacacttttgaggacgttcctttccacagcagctacgctcacagccagagtctggaccgtctcatgaatcctctcatcgaccagtacctgtattacttgagcagaacaaacactccaagtggaaccaccacgcagtcaaggcttcagttttctcaggccggagcgagtgacattcgggaccagtctaggaactggcttcctggaccctgttaccgccagcagcgcgtttctaaaacaaaaacagacaacaacaacagcaattttacctggactggtgcttcaaaatataaccttaatgggcgtgaatctataatcaaccctggcactgctatggcctcacacaaagacgacgaagacaagttctttcccatgagcggtgtcatgatttttggaaaagagagcgccggagcttcaaacactgcattggacaatgtcatgatcacagacgaagaggaaatcaaagccactaaccccgtggccaccgaaagatttgggactgtggcagtcaatctccagagcagcagcacagaccctgcgaccggagatgtgcatgttatgggagcattacctggcatggtgtggcaagatagagacgtgtacctgcagggtcccatttgggccaaaattcctcacacagatggacactttcacccgtctcctcttatgggcggctttggactcaagaacccgcctcctcagatcctcatcaaaaacacgcctgttcctgcgaatcctccggcggagttttcagctacaaagtttgcttcattcatcacccaatactccacaggacaagtgagtgtggaaattgaatgggagctgcagaaagaaaacagcaagcgctggaatcccgaagtgcagtacacatccaattatgcaaaatctgccaacgttgattttactgtggacaacaatggactttatactgagcctcgccccattggcacccgttaccttacccgtcccctgtaa

SEQ ID NO: 5214 - protein, 736 aa, Artificial Sequence
  Description of Artificial Sequence: Synthetic polypeptide
MAADGYLPDWLEDNLSEGIREWWDLKPGAPKPKANQQHQDNARGLVLPGYKYLGPGNGLDKGEPVNAADAAALEHDKAYDQQLKAGDNPYLKYNHADAEFQERLKEDTSFGGNLGRAVFQAKKRLLEPLGLVEEAAKTAPGKKRPVEPSPQRSPDSSTGIGKKGQQPAKKRLNFGQTGDSESVPDPQPLGEPPATPAAVGPTTMASGGGAPMADNNEGADGVGNSSGNWHCDSQWLGDRVITTSTRTWALPTYNNHLYKQISSQSGASNDNHYFGYSTPWGYFDFNRFHCHFSPRDWQRLINNNWGFRPKRLNFKLFNIQVKEVTTNDGVTTIANNLTSTVQVFSDSEYQLPYVLGSAHQGCLPPFPADVFMIPQYGYLTLNNGSQAVGRSSFYCLEYFPSQMLRTGNNFTFSYTFEDVPFHSSYAHSQSLDRLMNPLIDQYLYYLSRTNTPSGTTTQSRLQFSQAGASDIRDQSRNWLPGPCYRQQRVSKTKTDNNNSNFTWTGASKYNLNGRESIINPGTAMASHKDDEDKFFPMSGVMIFGKESAGASNTALDNVMITDEEEIKATNPVATERFGTVAVNLQSSSTDPATGDVHVMGALPGMVWQDRDVYLQGPIWAKIPHTDGHFHPSPLMGGFGLKNPPPQILIKNTPVPANPPAEFSATKFASFITQYSTGQVSVEIEWELQKENSKRWNPEVQYTSNYAKSANVDFTVDNNGLYTEPRPIGTRYLTRPL

SEQ ID NO: 5215 - DNA, 2214 bp, Artificial Sequence; identical to SEQ ID NO: 5187
  Description of Artificial Sequence: Synthetic polynucleotide

SEQ ID NO: 5216 - protein, 737 aa, Artificial Sequence; identical to SEQ ID NO: 5188
  Description of Artificial Sequence: Synthetic polypeptide

SEQ ID NO: 5217 - DNA, 2205 bp, Artificial Sequence
  Description of Artificial Sequence: Synthetic polynucleotide
atggctgctgacggttatcttccagattggctcgaggacaacctttctgaaggcattcgtgagtggtgggctctgaaacctggagtccctcaacccaaagcgaaccaacaacaccaggacaaccgtcggggtcttgtgcttccgggttacaaatacctcggacccggtaacggactcgacaaaggagagccggtcaacgaggcggacgcggcagccctcgaacacgacaaggcctacgaccagcagctcaaggccggagacaacccgtacctcaagtacaaccacgccgacgccgagttccaggagcggctcaaagaagatacgtcttttgggggcaacctcgggcgagcagtcttccaggccaaaaagaggcttcttgaacctcttggtctggttgaggaagcggctaagacggctcctggaaagaagaggcctgtagagcagtctcctcaggaaccggactcctccgcgggtattggcaaatcgggtgcacagcccgctaaaaagagactcaatttcggtcagactggcgacacagagtcagtcccagaccctcaaccaatcggagaacctcccgcagccccctcaggtgtgggatctcttacaatggcttcaggtggtggcgcaccagtggcagacaataacgaaggtgccgatggagtgggtagttcctcgggaaattggcattgcgattcccaatggctgggggacagagtcatcaccaccagcacccgaacctgggccctgcccacctacaacaaccacctctacaaacaaatttccagccaatcaggagcctcgaacgacaatcactactttggctacagcaccccttgggggtattttgacttcaacagattccactgccacttttcaccacgtgactggcagcgactcatcaacaacaactggggattccggcccaagagactcagcttcaagctcttcaacatccaggtcaaagaggttacggacaacaatggagtcaagaccatcgccaataaccttaccagcacggtccaggtcttcacggactcagactatcagctcccgtacgtgctcgggtcggctcacgagggctgcctcccgccgttcccagcggacgttttcatgattcctcagtacgggtatctgacgcttaatgatggaagccaggccgtgggtcgttcgtccttttactgcctggaatatttcccgtcgcaaatgctaagaacgggtaacaacttccagttcagctacgagtttgagaacgtacctttccatagcagctacgctcacagccaaagcctggaccgactaatgaatccactcatcgaccaatacttgtactatctctcaaagactattaacggttctggacagaatcaacaaacgctaaaattcagtgtggccggacccagcaacatggctgtccagggaagaaactacatacctggacccagctaccgacaacaacgtgtctcaaccactgtgactcaaaacaacaacagcgaatttgcttggcctggagcttcttcttgggctctcaatggacgtaatagcttgatgaatcctggacctgctatggccagccacaaagaaggagaggaccgtttctttcctttgtctggatctttaatttttggcaaacaaggaactggaagagacaacgtggatgcggacaaagtcatgataaccaacgaagaagaaattaaaactactaacccggtagcaacggagtcctatggacaagtggccacaaaccaccagagtgcccaagcacaggcgcagaccggctgggttcaaaaccaaggaatacttccgggtatggtttggcaggacagagatgtgtacctgcaaggacccatttgggccaaaattcctcacacggacggcaactttcacccttctccgctgatgggagggtttggaatgaaacacccgcctcctcagatcctcatcaaaaacacacctgtacctgcggatcctccaacggccttcaacaaggacaagctgaactctttcatcacccagtattctactggccaagtcagcgtggagatcgagtgggagctgcagaaggaaaacagcaagcgctggaaccccgagatccagtacacctccaactactacaaatctacaagtgtggactttgctgttaatacagaaggcgtgtactctgaaccccgccccattggcacccgttacctcacccgtaatctgtaa

SEQ ID NO: 5218 - protein, 734 aa, Artificial Sequence
  Description of Artificial Sequence: Synthetic polypeptide
MAADGYLPDWLEDNLSEGIREWWALKPGVPQPKANQQHQDNRRGLVLPGYKYLGPGNGLDKGEPVNEADAAALEHDKAYDQQLKAGDNPYLKYNHADAEFQERLKEDTSFGGNLGRAVFQAKKRLLEPLGLVEEAAKTAPGKKRPVEQSPQEPDSSAGIGKSGAQPAKKRLNFGQTGDTESVPDPQPIGEPPAAPSGVGSLTMASGGGAPVADNNEGADGVGSSSGNWHCDSQWLGDRVITTSTRTWALPTYNNHLYKQISSQSGASNDNHYFGYSTPWGYFDFNRFHCHFSPRDWQRLINNNWGFRPKRLSFKLFNIQVKEVTDNNGVKTIANNLTSTVQVFTDSDYQLPYVLGSAHEGCLPPFPADVFMIPQYGYLTLNDGSQAVGRSSFYCLEYFPSQMLRTGNNFQFSYEFENVPFHSSYAHSQSLDRLMNPLIDQYLYYLSKTINGSGQNQQTLKFSVAGPSNMAVQGRNYIPGPSYRQQRVSTTVTQNNNSEFAWPGASSWALNGRNSLMNPGPAMASHKEGEDRFFPLSGSLIFGKQGTGRDNVDADKVMITNEEEIKTTNPVATESYGQVATNHQSAQAQAQTGWVQNQGILPGMVWQDRDVYLQGPIWAKIPHTDGNFHPSPLMGGFGMKHPPPQILIKNTPVPADPPTAFNKDKLNSFITQYSTGQVSVEIEWELQKENSKRWNPEIQYTSNYYKSTSVDFAVNTEGVYSEPRPIGTRYLTRNL

SEQ ID NO: 5219 - DNA, 2217 bp, Artificial Sequence
  Description of Artificial Sequence: Synthetic polynucleotide
atggctgccgatggttatcttccagattggctcgaggacaacctctctgagggcattcgcgagtggtgggcgctgaaacctggagccccgaagcccaaagccaaccagcaaaagcaggacgacggccggggtctggtgcttcctggctacaagtacctcggacccttcaacggactcgacaagggggagcccgtcaacgcggcggacgcagcggccctcgagcacgacaaggcctacgaccagcagctgcaggcgggtgacaatccgtacctgcggtataaccacgccgacgccgagtttcaggagcgtctgcaagaagatacgtcttttgggggcaacctcgggcgagcagtcttccaggccaagaagcgggttctcgaacctctcggtctggttgaggaaggcgctaagacggctcctggaaagaagagaccggtagagccatcaccccagcgttctccagactcctctacgggcatcggcaagaaaggccaacagcccgccagaaaaagactcaattttggtcagactggcgactcagagtcagttccagaccctcaacctctcggagaacctccagcagcgccctctggtgtgggacctaatacaatggctgcaggcggtggcgcaccaatggcagacaataacgaaggcgccgacggagtgggtagttcctcgggaaattggcattgcgattccacatggctgggcgacagagtcatcaccaccagcacccgaacctgggccctgcccacctacaacaaccacctctacaagcaaatctccaacgggacatcgggaggagccaccaacgacaacacctacttcggctacagcaccccctgggggtattttgactttaacagattccactgccacttttcaccacgtgactggcagcgactcatcaacaacaactggggattccggcccaagagactcagcttcaagctcttcaacatccaggtcaaggaggtcacgcagaatgaaggcaccaagaccatcgccaataacctcaccagcaccatccaggtgtttacggactcggagtaccagctgccgtacgttctcggctctgcccaccagggctgcctgcctccgttcccggcggacgtgttcatgattccccagtacggctacctaacactcaacaacggtagtcaggccgtgggacgctcctccttctactgcctggaatactttccttcgcagatgctgagaaccggcaacaacttccagtttacttacaccttcgaggacgtgcctttccacagcagctacgcccacagccagagcttggaccggctgatgaatcctctgattgaccagtacctgtactacttgtctcggactcaaacaacaggaggcacggcaaatacgcagactctgggcttcagccaaggtgggcctaatacaatggccaatcaggcaaagaactggctgccaggaccctgttaccgccaacaacgcgtctcaacgacaaccgggcaaaacaacaatagcaactttgcctggactgctgggaccaaataccatctgaatggaagaaattcattggctaatcctggcatcgctatggcaacacacaaagacgacgaggagcgtttttttcccagtaacgggatcctgatttttggcaaacaaaatgctgccagagacaatgcggattacagcgatgtcatgctcaccagcgaggaagaaatcaaaaccactaaccctgtggctacagaggaatacggtatcgtggcagataacttgcagcagcaaaacacggctcctcaaattggaactgtcaacagccagggggccttacccggtatggtctggcagaaccgggacgtgtacctgcagggtcccatctgggccaagattcctcacacggacggcaacttccacccctctcccctcatgggtggattcggacttaaacatcctccgcctcagatcctgatcaagaacacgcctgtacctgcggatcctccgaccaccttcaaccagtcaaagctgaactctttcatcacgcaatacagcaccggacaggtcagcgtggaaattgaatgggagctgcagaaggaaaacagcaagcgctggaaccccgagatccagtacacctccaactactacaaatctacaagtgtggactttgctgttaatacagaaggcgtgtactctgaaccccgccccattggcacccgttacctcacccgtaatctgtaa

SEQ ID NO: 5220 - protein, 738 aa, Artificial Sequence; identical to SEQ ID NO: 5122
  Description of Artificial Sequence: Synthetic polypeptide

SEQ ID NO: 5221 - DNA, 2211 bp, Artificial Sequence
  Description of Artificial Sequence: Synthetic polynucleotide
atggctgctgacggttatcttccagattggctcgaggacaacctttctgaaggcattcgagagtggtgggcgctgcaacctggagcccctaaacccaaggcaaatcaacaacatcaggacaacgctcggggtcttgtgcttccgggttacaaatacctcggacccggcaacggactcgacaagggggaacccgtcaacgcagcggacgcggcagccctcgagcacgacaaggcctacgaccagcagctcaaggccggtgacaacccctacctcaagtacaaccacgccgacgccgagttccaggagcggctcaaagaagatacgtcttttgggggcaacctcgggcgagcagtcttccaggccaaaaagaggcttcttgaacctcttggtctggttgaggaagcggctaagacggctcctggaaagaagaggcctgtagatcagtctcctcaggaaccggactcatcatctggtgttggcaaatcgggcaaacagcctgccagaaaaagactaaatttcggtcagactggcgactcagagtcagtcccagaccctcaacctctcggagaaccaccagcagcccccacaagtttgggatctaatacaatggcttcaggcggtggcgcaccaatggcagacaataacgagggtgccgatggagtgggtaattcctcaggaaattggcattgcgattcccaatggctgggcgacagagtcatcaccaccagcaccagaacctgggccctgcccacttacaacaaccatctctacaagcaaatctccagccaatcaggagcttcaaacgacaaccactactttggctacagcaccccttgggggtattttgactttaacagattccactgccacttctcaccacgtgactggcagcgactcattaacaacaactggggattccggcccaagaaactcagcttcaagctcttcaacatccaagttaaagaggtcacgcagaacgatggcacgacgactattgccaataaccttaccagcacggttcaggtgtttacggactcggagtatcagctcccgtacgtgctcgggtcggcgcaccaaggctgtctcccgccgtttccagcggacgtcttcatggtccctcagtatggatacctcaccctgaacaacggaagtcaagcggtgggacgctcatccttttactgcctggagtacttcccttcgcagatgctaaggactggaaataacttccaattcagctataccttcgaggatgtaccttttcacagcagctacgctcacagccagagtttggatcgcttgatgaatcctcttattgatcagtatctgtactacctgaacagaacgcaaggaacaacctctggaacaaccaaccaatcacggctgctttttagccaggctgggcctcagtctatgtctttgcaggccagaaattggctacctgggccctgctaccggcaacagagactttcaaagactgctaacgacaacaacaacagtaactttccttggacagcggccagcaaatatcatctcaatggccgcgactcgctggtgaatccaggaccagctatggccagtcacaaggacgatgaagaaaaatttttccctatgcacggcaatctaatatttggcaaagaagggacaacggcaagtaacgcagaattagataatgtaatgattacggatgaagaagagattcgtaccaccaatcctgtggcaacagagcagtatggaactgtggcaaataacttgcagagctcaaatacagctcccacgactagaactgtcaatgatcagggggccttacctggcatggtgtggcaagatcgtgacgtgtaccttcaaggacctatctgggcaaagattcctcacacggatggacactttcatccttctcctctgatgggaggctttggactgaaacatccgcctcctcaaatcatgatcaaaaatactccggtaccggcaaatcctccgacgactttcagcccggccaagtttgcttcatttatcactcagtactccactggacaggtcagcgtggaaattgagtgggagctacagaaagaaaacagcaaacgttggaatccagagattcagtacacttccaactacaacaagtctgttaatgtggactttactgtagacactaatggtgtttatagtgaacctcgccccattggcacccgttaccttacccgtcccctgtaa

SEQ ID NO: 5222 - protein, 736 aa, Artificial Sequence; identical to SEQ ID NO: 5192
  Description of Artificial Sequence: Synthetic polypeptide

SEQ ID NO: 5223 - DNA, 2211 bp, Artificial Sequence; identical to SEQ ID NO: 5191
  Description of Artificial Sequence: Synthetic polynucleotide

SEQ ID NO: 5224 - protein, 736 aa, Artificial Sequence; identical to SEQ ID NO: 5192
  Description of Artificial Sequence: Synthetic polypeptide

SEQ ID NO: 5225 - DNA, 2211 bp, Artificial Sequence
  Description of Artificial Sequence: Synthetic polynucleotide
atggctgctgacggttatcttccagattggctcgaggacaacctttctgaaggcattcgtgagtggtgggctctgaaacctggagtccctcaacccaaagcgaaccaacaacaccaggacaaccgtcggggtcttgtgcttccgggttacaaatacctcggacccggtaacggactcgacaaaggagagcccgtcaacgcggcggatgcagcggccctcgagcacgacaaggcctacgaccagcagctcaaagcgggtgacaatccgtacctgcggtataaccacgccgacgccgagtttcaggagcgtctgcaagaagatacgtcttttgggggcaacctcgggcgagcagtcttccaggccaagaagagggttctcgaaccttttggtctggttgaggaaggtgctaagacggctcctggaaagaaacgtccggtagagcagtcgccacaagagccagactcctcctcgggcatcggcaagacaggccagcagcccgctaaaaagagactcaattttggtcagactggcgactcagagtcagtccccgacccacaacctctcggagaacctccagcaacccccgctgctgtgggacctactacaatggcttcaggcggtggcgcaccaatggcagacaataacgaaggcgccgacggagtgggtaatgcctcaggaaattggcattgcgattccacatggctgggcgacagagtcatcaccaccagcacccgcacctgggccttgcccacctacaataaccacctctacaagcaaatctccagtgcttcaacgggggccagcaacgacaaccactacttcggctacagcaccccctgggggtattttgatttcaacagattccactgccatttctcaccacgtgactggcagcgactcatcaacaacaattggggattccggcccaagagactcaacttcaagctcttcaacatccaagtcaaggaggtcacgacgaatgatggcgtcacgaccatcgctaataaccttaccagcacggttcaagtcttctcggactcggagtaccagcttccgtacgtcctcggctctgcgcaccagggctgcctccctccgttcccggcggacgtgttcatgattccgcaatacggctacctgacgctcaacaatggcagccaagccgtgggacgttcatccttttactgcctggaatatttcccttctcagatgctgagaacgggcaacaactttaccttcagctacacctttgaggaagtgcctttccacagcagctacgcgcacagccagagcctggaccggctgatgaatcctctcatcgaccaatacctgtattacctgaacagaactcaaaatcagtccggaagtgcccaaaacaaggacttgctgtttagccgtgggtctccagctggcatgtctgttcagcccaaaaactggctacctggaccctgttatcggcagcagcgcgtttctaaaacaaaaacagacaacaacaacagcaattttacctggactggtgcttcaaaatataacctcaatgggcgtgaatccatcatcaaccctggcactgctatggcctcacacaaagacgacgaagacaagttctttcccatgagcggtgtcatgatttttggaaaagagagcgccggagcttcaaacactgcattggacaatgtcatgattacagacgaagaggaaattaaagccactaaccctgtggccaccgaaagatttgggaccgtggcagtcaatttccagagcagcagcacagaccctgcgaccggagatgtgcatgttatgggagccttacctggaatggtgtggcaagacagagacgtatacctgcagggtcctatttgggccaaaattcctcacacggatggacactttcacccgtctcctctcatgggcggctttggacttaagcacccgcctcctcagatcctcatcaaaaacacgcctgttcctgcgaatcctccggcagagttttcggctacaaagtttgcttcattcatcacccagtattccacaggacaagtgagcgtggagattgaatgggagctgcagaaagaaaacagcaaacgctggaatcccgaagtgcagtatacatctaactatgcaaaatctgccaacgttgatttcactgtggacaacaatggactttatactgagcctcgccccattggcacccgttacctcacccgtcccctgtaa

SEQ ID NO: 5226 - protein, 736 aa, Artificial Sequence
  Description of Artificial Sequence: Synthetic polypeptide
MAADGYLPDWLEDNLSEGIREWWALKPGVPQPKANQQHQDNRRGLVLPGYKYLGPGNGLDKGEPVNAADAAALEHDKAYDQQLKAGDNPYLRYNHADAEFQERLQEDTSFGGNLGRAVFQAKKRVLEPFGLVEEGAKTAPGKKRPVEQSPQEPDSSSGIGKTGQQPAKKRLNFGQTGDSESVPDPQPLGEPPATPAAVGPTTMASGGGAPMADNNEGADGVGNASGNWHCDSTWLGDRVITTSTRTWALPTYNNHLYKQISSASTGASNDNHYFGYSTPWGYFDFNRFHCHFSPRDWQRLINNNWGFRPKRLNFKLFNIQVKEVTTNDGVTTIANNLTSTVQVFSDSEYQLPYVLGSAHQGCLPPFPADVFMIPQYGYLTLNNGSQAVGRSSFYCLEYFPSQMLRTGNNFTFSYTFEEVPFHSSYAHSQSLDRLMNPLIDQYLYYLNRTQNQSGSAQNKDLLFSRGSPAGMSVQPKNWLPGPCYRQQRVSKTKTDNNNSNFTWTGASKYNLNGRESIINPGTAMASHKDDEDKFFPMSGVMIFGKESAGASNTALDNVMITDEEEIKATNPVATERFGTVAVNFQSSSTDPATGDVHVMGALPGMVWQDRDVYLQGPIWAKIPHTDGHFHPSPLMGGFGLKHPPPQILIKNTPVPANPPAEFSATKFASFITQYSTGQVSVEIEWELQKENSKRWNPEVQYTSNYAKSANVDFTVDNNGLYTEPRPIGTRYLTRPL

SEQ ID NO: 5227 - DNA, 2217 bp, Artificial Sequence
  Description of Artificial Sequence: Synthetic polynucleotide
atggctgccgatggttatcttccagattggctcgaggacaacctctctgagggcattcgcgagtggtgggacttgaaacctggagccccgaaacccaaagccaaccagcaaaagcaggacgacggccggggtctggtgcttcctggctacaagtacctcggacccttcaacggactcgacaagggggagcccgtcaacgcggcggatgcaacggccctcgagcacgacaaggcctacgaccagcagctgcaggcgggtgacaatccgtacctgcggtataaccacgccgacgccgagtttcaggagcgtctgcaagaagatacgtcttttgggggcaacctcgggcgagcagtcttccaggccaagaagcgggttctcgaacctctcggtctggttgaggaaggcgctaagacggctcctggaaagaagagaccggtagagccatcaccccagcgttctccagactcctctacgggcatcggcaagaaaggccaacagcccgccagaaaaagactcaattttggtcagactggcgactcagagtcagttccagaccctcaacctctcggagaaccaccagcagcccccacaagtttgggatctaatacaatggcttcaggcggtggcgcaccaatggcagacaataacgagggtgccgatggagtgggtaattcctcaggaaattggcattgcgattcccaatggctgggcgacagagtcatcaccaccagcacccgcacctgggccttgcccacctacaataaccacctctacaagcaaatctccagtgcttcaacgggggccagcaacgacaaccactacttcggctacagcaccccctgggggtattttgactttaaccgcttccactgccacttctcgccaagagactggcaaagactcatcaacaacaattggggattccggcccaagagactcaacttcaaactcttcaacatccaagtcaaggaggtcacgacgaatgatggcgtcacgaccatcgccaataacctcaccagcaccatccaggtgtttacggactcggagtaccagctgccgtacgttctcggctctgcccaccagggctgcctgcctccgttcccggcggacgtgttcatgattccccagtatggatacctcaccctgaacaacggaagtcaagcggtgggacgctcatccttttactgcctggagtacttcccttcgcagatgctaaggactggaaataacttccaattcagctataccttcgaggatgtaccttttcacagcagctacgctcacagccagagtttggatcgcttgatgaatcctcttattgatcagtatctgtactacctgaacagaacgcaaggaacaacctctggaacaaccaaccaatcacggctgctttttagccaggctgggcctcagtctatgtctttgcaggccagaaattggctacctgggccctgctaccggcaacagagactttcaaagactgctaacgacaacaacaacagtaactttccttggacagcagccagcaaatatcatctcaatggccgcgactcgctggtgaatccaggaccagctatggccagtcacaaggacgatgaagaaaaatttttccctatgcacggcaatctaatatttggcaaagaagggacaacggcaagtaacgcagaattagataatgtaatgattacggatgaagaagagattcgtaccaccaatcctgtggcaacagagcagtatggaactgtggcaaataacttgcagagctcaaatacagctcccacgactagaactgtcaatgatcagggggccttacctggcatggtgtggcaagatcgtgacgtgtaccttcaggggcccatctgggcaaagattccacacacggacggacattttcacccctctcccctcatgggtggattcggacttaaacaccctcctccgcagattctcatcaagaacaccccggtacctgcgaatccttcgaccaccttcagtgcggcaaagtttgcttccttcatcacacagtactccacgggacaggtcagcgtggagatcgagtgggagctgcagaaggaaaacagcaagcgctggaacccggagatccagtacacttccaactattacaagtctaataatgttgaatttgctgttaatactgaaggtgtatatagtgaaccccgccccattggcaccagatacctgactcgtaatctgtaa

SEQ ID NO: 5228 - protein, 738 aa, Artificial Sequence
  Description of Artificial Sequence: Synthetic polypeptide
MAADGYLPDWLEDNLSEGIREWWDLKPGAPKPKANQQKQDDGRGLVLPGYKYLGPFNGLDKGEPVNAADATALEHDKAYDQQLQAGDNPYLRYNHADAEFQERLQEDTSFGGNLGRAVFQAKKRVLEPLGLVEEGAKTAPGKKRPVEPSPQRSPDSSTGIGKKGQQPARKRLNFGQTGDSESVPDPQPLGEPPAAPTSLGSNTMASGGGAPMADNNEGADGVGNSSGNWHCDSQWLGDRVITTSTRTWALPTYNNHLYKQISSASTGASNDNHYFGYSTPWGYFDFNRFHCHFSPRDWQRLINNNWGFRPKRLNFKLFNIQVKEVTTNDGVTTIANNLTSTIQVFTDSEYQLPYVLGSAHQGCLPPFPADVFMIPQYGYLTLNNGSQAVGRSSFYCLEYFPSQMLRTGNNFQFSYTFEDVPFHSSYAHSQSLDRLMNPLIDQYLYYLNRTQGTTSGTTNQSRLLFSQAGPQSMSLQARNWLPGPCYRQQRLSKTANDNNNSNFPWTAASKYHLNGRDSLVNPGPAMASHKDDEEKFFPMHGNLIFGKEGTTASNAELDNVMITDEEEIRTTNPVATEQYGTVANNLQSSNTAPTTRTVNDQGALPGMVWQDRDVYLQGPIWAKIPHTDGHFHPSPLMGGFGLKHPPPQILIKNTPVPANPSTTFSAAKFASFITQYSTGQVSVEIEWELQKENSKRWNPEIQYTSNYYKSNNVEFAVNTEGVYSEPRPIGTRYLTRNL

SEQ ID NO: 5229 - DNA, 2208 bp, Artificial Sequence
  Description of Artificial Sequence: Synthetic polynucleotide
atggctgccgatggttatcttccagattggctcgaggacaaccttagtgaaggaattcgcgagtggtgggacttgaaacctggagccccgaagcccaaagccaaccagcaaaagcaggacgacggccggggtctggtgcttcctggctacaagtacctcggacccttcaacggactcgacaagggggagcccgtcaacgcggcggacgcagcggccctcgagcacgacaaggcctacgaccagcagctcaaagcgggtgacaatccgtacctgcggtataaccacgccgacgccgagtttcaggagcgtctgcaagaagatacgtcttttgggggcaacctcgggcgagcagtcttccaggccaagaagcgggttctcgaacctctcggtctggttgaggaaggtgctaagacggctcctggaaagaaacgtccggtagagcagtcgccacaagagccagactcctcctcgggcattggcaagacaggccagcagcccgctaaaaagagactcaattttggtcagactggcgactcagagtcagtccccgacccacaacctctcggagaacctccagcaacccccgctgctgtgggacctactacaatggcttcaggcggtggcgcaccaatggcagacaataacgaaggcgccgacggagtgggtaatgcctcaggaaattggcattgcgattccacatggctgggcgacagagtcatcaccaccagcacccgaacctgggccctgcccacctacaacaaccacctctacaaacaaatttccagccaatcaggagcctcgaacgacaatcactactttggctacagcaccccttgggggtattttgatttcaacagattccactgccacttttcaccacgtgactggcagcgactcatcaacaacaattggggattccggcccaagagactcagcttcaagctcttcaacatccaggtcaaggaggtcacgcagaatgaaggcaccaagaccatcgccaataaccttaccagcacggttcaagtgtttacggactcggagtatcagctcccgtacgtgctcggctcggcgcatcaaggatgcctcccgccgttcccagcagacgtcttcatggtgccacagtatggatacctcaccctgaacaacgggagtcaggcagtaggacgctcttcattttactgcctggagtactttccttctcagatgctgcgtaccggaaacaactttaccttcagctacacttttgaggacgttcctttccacagcagctacgctcacagccagagtctggaccgtctcatgaatcctctgattgaccagtacctgtattacttgagcagaacaaacactccaagtggaaccaccacgcagtcaaggcttcagttttctcaggccggagcgagtgacattcgggaccagtctaggaactggcttcctggaccctgttaccgccagcagcgagtatcaaagacatctgcggataacaacaacagtgaatactcgtggactggagctaccaagtaccacctcaatggcagagactctctggtgaatccgggcccggccatggcaagccacaaggactatgaagaaaagttttttcctcagagcggggttctcatctttgggaagcaaggctcagagaaaacaaatgtggacattgaaaaggtcatgattacagacgaagaggaaatcaggacaaccaatcccgtggctacggagcagtatggttctgtatctaccaacctccagagaggcaacagacaagcagctaccgcagatgtcaacacacaaggcgttcttccaggcatggtctggcaggacagagatgtgtaccttcaggggcccatctgggcaaagattccacacacggacggacattttcacccgtctccgctgatgggcggctttggcctgaaacatcctccgcctcagatcctgatcaagaacacgcctgtacctgcggatcctccgaccaccttcaaccagtcaaagctgaactctttcatcactcagtattctactggccaagtcagcgtggagatcgagtgggagctgcagaaggaaaacagcaagcgctggaaccccgagatccagtacacctccaactactacaaatctacaagtgtggactttgctgttaatacagaaggcgtgtactctgaaccccgccccattggcacccgttacctcacccgtaatctgtaa

SEQ ID NO: 5230 - protein, 735 aa, Artificial Sequence
  Description of Artificial Sequence: Synthetic polypeptide
MAADGYLPDWLEDNLSEGIREWWDLKPGAPKPKANQQKQDDGRGLVLPGYKYLGPFNGLDKGEPVNAADAAALEHDKAYDQQLKAGDNPYLRYNHADAEFQERLQEDTSFGGNLGRAVFQAKKRVLEPLGLVEEGAKTAPGKKRPVEQSPQEPDSSSGIGKTGQQPAKKRLNFGQTGDSESVPDPQPLGEPPATPAAVGPTTMASGGGAPMADNNEGADGVGNASGNWHCDSTWLGDRVITTSTRTWALPTYNNHLYKQISSQSGASNDNHYFGYSTPWGYFDFNRFHCHFSPRDWQRLINNNWGFRPKRLSFKLFNIQVKEVTQNEGTKTIANNLTSTVQVFTDSEYQLPYVLGSAHQGCLPPFPADVFMVPQYGYLTLNNGSQAVGRSSFYCLEYFPSQMLRTGNNFTFSYTFEDVPFHSSYAHSQSLDRLMNPLIDQYLYYLSRTNTPSGTTTQSRLQFSQAGASDIRDQSRNWLPGPCYRQQRVSKTSADNNNSEYSWTGATKYHLNGRDSLVNPGPAMASHKDYEEKFFPQSGVLIFGKQGSEKTNVDIEKVMITDEEEIRTTNPVATEQYGSVSTNLQRGNRQAATADVNTQGVLPGMVWQDRDVYLQGPIWAKIPHTDGHFHPSPLMGGFGLKHPPPQILIKNTPVPADPPTTFNQSKLNSFITQYSTGQVSVEIEWELQKENSKRWNPEIQYTSNYYKSTSVDFAVNTEGVYSEPRPIGTRYLTRNL

SEQ ID NO: 5231 - DNA, 2214 bp, Artificial Sequence
  Description of Artificial Sequence: Synthetic polynucleotide
atggctgccgatggttatcttccagattggctcgaggacaacctctctgagggcattcgcgagtggtgggacttgaaacctggagccccgaaacccaaagccaaccagcaaaagcaggacgacggccggggtctggtgcttcctggctacaagtacctcggacccttcaacggactcgacaagggggagcccgtcaacgcggcggatgcagcggccctcgagcacgacaaggcctacgaccagcagctcaaagcgggtgacaatccgtacctgcggtataaccacgccgacgccgagtttcaggagcgtctgcaagaagatacgtcttttgggggcaacctcgggcgagcagtcttccaggccaagaagagggttctcgaaccttttggtctggttgaggaaggtgctaagacggctcctggaaagaaacgtccggtagagcagtcgccacaagagccagactcctcctcgggcattggcaagacaggccagcagcctgcaagaaaaagattgaattttggtcagactggagacgcagactcagtacctgacccccagcctctcggacagccaccagcagccccctctggtctgggaactaatacgatggctacaggcagtggcgcaccaatggcagacaataacgagggcgccgacggagtgggtaattcctcgggaaattggcattgcgattcccaatggctgggggacagagtcatcaccaccagcacccgaacctgggccctgcccacctacaacaatcacctctacaagcaaatctccaacagcacatctggaggatcttcaaatgacaacgcctacttcggctacagcaccccctgggggtattttgatttcaacagattccactgccatttctcaccacgtgactggcagcgactcatcaacaacaattggggattccggcccaagagactcaacttcaagctcttcaacatccaggtcaaggaggtcacgcagaatgaaggcaccaagaccatcgccaataacctcaccagcaccatccaggtgtttacggactcggagtaccagctgccgtacgttctcggctctgcccaccagggctgcctgcctccgttcccggcggacgtgttcatgattccccagtacggctacctaacactcaacaacggtagtcaggccgtgggacgctcctccttctactgcctggaatactttccttcgcagatgctgagaaccggcaacaacttccagtttacttacaccttcgaggacgtgcctttccacagcagctacgcccacagccagagcttggaccggctgatgaatcctctgattgaccagtacctgtactacttgtctcggactcaaacaacaggaggcacgacaaatacgcagactctgggcttcagccaaggtgggcctaatacaatggccaatcaggcaaagaactggctgccaggaccctgttaccgccagcagcgagtatcaaagacatttgcggataacaacaacagtgaatactcgtggactggagctaccaagtaccacctcaatggcagagactctctggtgaatccgggcccggccatggcaagccacaaggacgatgaagaaaagttttttcctcagagcggggttctcatctttgggaagcaaggctcagagaaaacaaatgtggacattgaaaaggtcatgattacagacgaagaggaaatcaggacaaccaatcccgtggctacggagcagtatggttctgtatctaccaacctccagagaggcaacagacaagcagctaccgcagatgtcaacacacaaggcgttcttccaggcatggtctggcaggacagagatgtgtaccttcaggggcccatctgggcaaagattccacacacggacggacattttcacccctctcccctcatgggtggattcggacttaaacaccctccgcctcagatcctgatcaagaacacgcctgtacccgcggatcctccgaccaccttcaaccagtcaaagctgaactctttcatcacccagtattctactggccaagtcagcgtggagatcgagtgggagctgcagaaggaaaacagcaagcgctggaaccccgagatccagtacacctccaactactacaaatctacaagtgtggactttgctgttaatacagaaggcgtgtactctgaaccccgccccattggcacccgttacctcacccgtaatctgtaa

SEQ ID NO: 5232 - protein, 737 aa, Artificial Sequence
  Description of Artificial Sequence: Synthetic polypeptide
MAADGYLPDWLEDNLSEGIREWWDLKPGAPKPKANQQKQDDGRGLVLPGYKYLGPFNGLDKGEPVNAADAAALEHDKAYDQQLKAGDNPYLRYNHADAEFQERLQEDTSFGGNLGRAVFQAKKRVLEPFGLVEEGAKTAPGKKRPVEQSPQEPDSSSGIGKTGQQPARKRLNFGQTGDADSVPDPQPLGQPPAAPSGLGTNTMATGSGAPMADNNEGADGVGNSSGNWHCDSQWLGDRVITTSTRTWALPTYNNHLYKQISNSTSGGSSNDNAYFGYSTPWGYFDFNRFHCHFSPRDWQRLINNNWGFRPKRLNFKLFNIQVKEVTQNEGTKTIANNLTSTIQVFTDSEYQLPYVLGSAHQGCLPPFPADVFMIPQYGYLTLNNGSQAVGRSSFYCLEYFPSQMLRTGNNFQFTYTFEDVPFHSSYAHSQSLDRLMNPLIDQYLYYLSRTQTTGGTTNTQTLGFSQGGPNTMANQAKNWLPGPCYRQQRVSKTFADNNNSEYSWTGATKYHLNGRDSLVNPGPAMASHKDDEEKFFPQSGVLIFGKQGSEKTNVDIEKVMITDEEEIRTTNPVATEQYGSVSTNLQRGNRQAATADVNTQGVLPGMVWQDRDVYLQGPIWAKIPHTDGHFHPSPLMGGFGLKHPPPQILIKNTPVPADPPTTFNQSKLNSFITQYSTGQVSVEIEWELQKENSKRWNPEIQYTSNYYKSTSVDFAVNTEGVYSEPRPIGTRYLTRNL

SEQ ID NO: 5233 - DNA, 2217 bp, Artificial Sequence
  Description of Artificial Sequence: Synthetic polynucleotide
atggctgccgatggttatcttccagattggctcgaggacactctctctgaaggaataagacagtggtgggcgctgaaacctggagccccgaagcccaaagccaaccagcaaaagcaggacgacggccggggtctggtgcttcctggctacaagtacctcggacccttcaacggactcgacaagggggagcccgtcaacgcggcggatgcagcggccctcgagcacgacaaggcctacgaccagcagctcaaagcgggtgacaatccgtacctgcggtataaccacgccgacgccgagtttcaggagcgtctgcaagaagatacgtcttttgggggcaacctcgggcgagcagtcttccaggccaagaagcgggttctcgaacctctcggtctggttgaggaaggcgctaagacggctcctggaaagaagagaccggtagagccatcaccccagcgttctccagactcctctacgggcatcggcaagaaaggccaacagcccgccagaaaaagactcaattttggtcagactggcgactcagagtcagttccagaccctcaacctctcggagaaccaccagcagcccccacaagtttgggatctaatacaatggcttcaggcggtggcgcaccaatggcagacaataacgagggtgccgatggagtgggtaattcctcaggaaattggcattgcgattcccaatggctgggcgacagagtcatcaccaccagcacccgcacctgggccttgcccacctacaataaccacctctacaagcaaatctccagtgcttcaacgggggccagcaacgacaaccactacttcggctacagcaccccctgggggtattttgactttaaccgcttccactgccacttctcgccaagagactggcaaagactcatcaacaacaattggggattccggcccaagagactcaacttcaaactcttcaacatccaagtcaaggaggtcacgacgaatgatggcgtcacgaccatcgccaataacctcaccagcaccatccaggtgtttacggactcggagtaccagctgccgtacgttctcggctctgcccaccagggctgcctgcctccgttcccggcggacgtgttcatgattccccagtatggatacctcaccctgaacaacggaagtcaagcggtgggacgctcatccttttactgcctggagtacttcccttcgcagatgctaaggactggaaataacttccaattcagctataccttcgaggatgtaccttttcacagcagctacgctcacagccagagtttggatcgcttgatgaatcctcttattgatcagtatctgtactacctgaacagaacgcaaggaacaacctctggaacaaccaaccaatcacggctgctttttagccaggctgggcctcagtctatgtctttgcaggccagaaattggctacctgggccctgctaccggcaacagagactttcaaagactgctaacgacaacaacaacagtaactttccttggacagcagccagcaaatatcatctcaatggccgcgactcgctggtgaatccaggaccagctatggccagtcacaaggacgatgaagaaaaatttttccctatgcacggcaatctaatatttggcaaagaagggacaacggcaagtaacgcagaattagataatgtaatgattacggatgaagaagagattcgtaccaccaatcctgtggcaacagagcagtatggaactgtggcaaataacttgcagagctcaaatacagctcccacgactagaactgtcaatgatcagggggccttacctggcatggtgtggcaagatcgtgacgtgtaccttcaggggcccatctgggcaaagattccacacacggacggacattttcacccctctcccctcatgggtggattcggacttaaacaccctcctccgcagattctcatcaagaacaccccggtacctgcgaatccttcgaccaccttcagtgcggcaaagtttgcttccttcatcacacagtactccacgggacaggtcagcgtggagatcgagtgggagctgcagaaggaaaacagcaagcgctggaacccggagatccagtacacttccaactattacaagtctaataatgttgaatttgctgttaatactgaaggtgtatatagtgaaccccgccccattggcaccagatacctgactcgtaatctgtaa

SEQ ID NO: 5234 - protein, 738 aa, Artificial Sequence
  Description of Artificial Sequence: Synthetic polypeptide
MAADGYLPDWLEDTLSEGIRQWWALKPGAPKPKANQQKQDDGRGLVLPGYKYLGPFNGLDKGEPVNAADAAALEHDKAYDQQLKAGDNPYLRYNHADAEFQERLQEDTSFGGNLGRAVFQAKKRVLEPLGLVEEGAKTAPGKKRPVEPSPQRSPDSSTGIGKKGQQPARKRLNFGQTGDSESVPDPQPLGEPPAAPTSLGSNTMASGGGAPMADNNEGADGVGNSSGNWHCDSQWLGDRVITTSTRTWALPTYNNHLYKQISSASTGASNDNHYFGYSTPWGYFDFNRFHCHFSPRDWQRLINNNWGFRPKRLNFKLFNIQVKEVTTNDGVTTIANNLTSTIQVFTDSEYQLPYVLGSAHQGCLPPFPADVFMIPQYGYLTLNNGSQAVGRSSFYCLEYFPSQMLRTGNNFQFSYTFEDVPFHSSYAHSQSLDRLMNPLIDQYLYYLNRTQGTTSGTTNQSRLLFSQAGPQSMSLQARNWLPGPCYRQQRLSKTANDNNNSNFPWTAASKYHLNGRDSLVNPGPAMASHKDDEEKFFPMHGNLIFGKEGTTASNAELDNVMITDEEEIRTTNPVATEQYGTVANNLQSSNTAPTTRTVNDQGALPGMVWQDRDVYLQGPIWAKIPHTDGHFHPSPLMGGFGLKHPPPQILIKNTPVPANPSTTFSAAKFASFITQYSTGQVSVEIEWELQKENSKRWNPEIQYTSNYYKSNNVEFAVNTEGVYSEPRPIGTRYLTRNL

SEQ ID NO: 5235 - DNA, 2208 bp, Artificial Sequence; identical to SEQ ID NO: 5065
  Description of Artificial Sequence: Synthetic polynucleotide

SEQ ID NO: 5236 - protein, 735 aa, Artificial Sequence [sequence omitted]

SEQ ID NO: 5237 - DNA, 2208 bp, Artificial Sequence
  Description of Artificial Sequence: Synthetic polynucleotide
atggctgccgatggttatcttccagattggctcgaggacaacctctctgagggcattcgcgagtggtgggcgctgaaacctggagccccgaagcccaaagccaaccagcaaaagcaggacgacggccggggtctggtgcttcctggctacaagtacctcggacccttcaacggactcgacaagggggagcccgtcaacgcggcggacgccgcggccctcgagcacgacaaggcctacgaccagcagctgcaggcgggtgacaatccgtacctgcggtataaccacgccgacgccgagtttcaggagcgtctgcaagaagatacgtcttttgggggcaacctcgggcgagcagtcttccaggccaaaaagaggcttcttgaacctcttggtctggttgaggaagcagctaaaacggctcctggaaagaagaggcctgtagagcagtctcctcaggaaccggactcctccgcgggtattggcaaatcgggtgcacagcccgccaaaaagagactcaatttcggtcagactggcgactcagagtcagtcccagaccctcaacctctcggagaaccaccagcagcccccacaagtttgggatctaatacaatggcttcaggcggtggcgcaccaatggcagacaataacgaaggcgccgacggagtgggtaatgcctcaggaaattggcattgcgattccacatggctgggcgacagagtcatcaccaccagcacccgcacctgggccttgcccacctacagcaaccatctctacaagcaaatctccagccaatcaggagcttcaaacgacaacgactactttggctacagcaccccttgggggtattttgatttcaacagattccactgccacttttcaccacgtgactggcaaagactcatcaacaacaactggggattccgacccaagagactcaacttcaagctctttaacattcaagtcaaagaggtcacgcagaatgacggtacgacgacgattgccaataaccttaccagcacggttcaggtgtttactgactcggagtaccagctcccgtacgtcctcggctcggcgcatcaaggatgcctcccgccgttcccagcagacgtcttcatggtgccacagtatggatacctcaccctgaacaacgggagtcaggcagtaggacgctcttcattttactgcctggagtactttccttctcagatgctgcgtaccggaaacaactttaccttcagctacacttttgaggacgttcctttccacagcagctacgctcacagccagagtctggaccgtctcatgaatcctctcatcgaccagtacctgtattacttgagcagaacaaacactccaagtggaaccaccacgcagtcaaggcttcagttttctcaggccggagcgagtgacattcgggaccagtctaggaactggcttcctggaccctgttaccgccagcagcgagtatcaaagacatctgaggataacaacaacagtgaatactcgtggactggagctaccaagtaccacctcaatggcagagactctctggtgaatccgggcccggccatggcaagccacaaggacgatgaagaaaagttttttcctcagagcggggttctcatctttgggaagcaaggctcagagaaaacaaatgtggacattgaaaaggtcatgattacagacgaagaggaaatcaggacaaccaatcccgtggctacggagcagtatggttctgtatctaccaacctccagagaggcaacagacaagcagctaccgcagatgtcaacacacaaggcgttcttccaggcatggtctggcaggacagagatgtgtaccttcaggggcccatctgggcaaagattccacacacggacggacattttcacccctctcccctcatgggtggattcggacttaaacaccctcctccacagattctcatcaagaacaccccggtacctgcgaatccttcgaccaccttcagtgcggcaaagtttgcttccttcatcacacagtactccacgggacaggtcagcgtggagatcgagtgggagctgcagaaggaaaacagcaaacgctggaatcccgaaattcagtacacttccaactacaacaagtctgttaatgtggactttactgtggacactaatggcgtgtattcagagcctcgccccattggcaccagatacctgactcgtaatctgtaa

SEQ ID NO: 5238 - protein, 735 aa, Artificial Sequence
  Description of Artificial Sequence: Synthetic polypeptide
MAADGYLPDWLEDNLSEGIREWWALKPGAPKPKANQQKQDDGRGLVLPGYKYLGPFNGLDKGEPVNAADAAALEHDKAYDQQLQAGDNPYLRYNHADAEFQERLQEDTSFGGNLGRAVFQAKKRLLEPLGLVEEAAKTAPGKKRPVEQSPQEPDSSAGIGKSGAQPAKKRLNFGQTGDSESVPDPQPLGEPPAAPTSLGSNTMASGGGAPMADNNEGADGVGNASGNWHCDSTWLGDRVITTSTRTWALPTYSNHLYKQISSQSGASNDNDYFGYSTPWGYFDFNRFHCHFSPRDWQRLINNNWGFRPKRLNFKLFNIQVKEVTQNDGTTTIANNLTSTVQVFTDSEYQLPYVLGSAHQGCLPPFPADVFMVPQYGYLTLNNGSQAVGRSSFYCLEYFPSQMLRTGNNFTFSYTFEDVPFHSSYAHSQSLDRLMNPLIDQYLYYLSRTNTPSGTTTQSRLQFSQAGASDIRDQSRNWLPGPCYRQQRVSKTSEDNNNSEYSWTGATKYHLNGRDSLVNPGPAMASHKDDEEKFFPQSGVLIFGKQGSEKTNVDIEKVMITDEEEIRTTNPVATEQYGSVSTNLQRGNRQAATADVNTQGVLPGMVWQDRDVYLQGPIWAKIPHTDGHFHPSPLMGGFGLKHPPPQILIKNTPVPANPSTTFSAAKFASFITQYSTGQVSVEIEWELQKENSKRWNPEIQYTSNYNKSVNVDFTVDTNGVYSEPRPIGTRYLTRNL

SEQ ID NO: 5239 - DNA, 2208 bp, Artificial Sequence
  Description of Artificial Sequence: Synthetic polynucleotide
atggctgccgatggttatcttccagattggctcgaggacaacctctctgagggcattcgcgagtggtgggcgctgaaacctggagccccgaagcccaaagccaaccagcaaaagcaggacgacggccggggtctggtgcttcctggctacaagtacctcggacccttcaacggactcgacaagggggagcccgtcaacgcggcggacgcagcggccctcgagcacgacaaggcctacgaccagcagctgcaggcgggtgacaatccgtacctgcggtataaccacgccgacgccgagttccaggagcgtctgcaagaagatacgtcttttgggggcaacctcgggcgagcagtcttccaggccaagaagagggttctcgaaccttttggtctggttgaggaaggtgctaagacggctcctggaaagaaacgtccggtagagcagtcgccacaagagccagactcctcctcgggcattggcaagacaggccagcagcccgctaaaaagagactcaattttggtcagactggcgactcagagtcagtcccagaccctcaacctctcggagaaccaccagcagcccccacaagtttgggatctaatacaatggcttcaggcggtggcgcaccaatggcagacaataacgagggcgccgacggagtgggtaattcctcgggaaattggcattgcgattccacatggatgggcgacagagtcatcaccaccagcacccgaacctgggccctgcccacctacaacaaccacctctacaaacaaatttccagccaatcaggagcttcaaacgacaaccactactttggctacagcaccccttgggggtattttgactttaacagattccactgccacttttcaccacgtgactggcagcgactcattaacaacaactggggattccggcccaagaaactcaacttcaagctctttaacatccaggtcaaggaggtcacgcagaatgaaggcaccaagaccatcgccaataacctcaccagcaccatccaggtgtttacggactcggagtaccagctgccgtacgttctcggctctgcccaccagggctgcctgcctccgttcccggcggacgtgttcatgattccccagtacggctacctaacactcaacaacggtagtcaggccgtgggacgctcctccttctactgcctggaatactttccttcgcagatgctgagaaccggcaacaacttccagtttacttacaccttcgaggacgtgcctttccacagcagctacgcccacagccagagcttggaccggctgatgaatcctctgattgaccagtacctgtattacttgtctcggactcaaacaacaggaggcacgacaaatacgcagactctgggcttcagccaaggtgggcctaatacaatggccaatcaggcaaagaactggctgcctggaccctgttaccgccagcagcgagtatcaaagacatctgcggataacaacaacagtgaatactcgtggactggagctaccaagtaccacctcaatggcagagactctctggtgaatccgggcccggccatggcaagccacaaggacgatgaagaaaagttttttcctcagagcggggttctcatctttgggaagcaaggctcagagaaaacaaatgtggacattgaaaaggttatgattacagacgaagaggaaatcaggacaaccaatcccgtggctacggagcagtatggttctgtatctaccaacctccagagaggcaacagacaagcagctaccgcagatgtcaacacacagggcgttcttccaggcatggtctggcaggacagagatgtgtaccttcagggtcccatttgggccaaaattcctcacacagatggacactttcacccgtcccctcttatgggcggctttggactcaagaacccgcctcctcagatcctcatcaaaaacacgcctgttcctgcgaatcctccggcagagttttcagctacaaagtttgcttcattcatcacccaatactccacaggacaagtgagtgtggaaattgaatgggagctgcagaaagaaaacagcaagcgctggaatcccgaagtgcagtacacatccaattatgcaaaatctgccaacgttgattttactgtggacactaatggcgtgtattcagagcctcgccccattggcaccagatacctcacccgtaatctgtaa

SEQ ID NO: 5240 - protein, 735 aa, Artificial Sequence
  Description of Artificial Sequence: Synthetic polypeptide
MAADGYLPDWLEDNLSEGIREWWALKPGAPKPKANQQKQDDGRGLVLPGYKYLGPFNGLDKGEPVNAADAAALEHDKAYDQQLQAGDNPYLRYNHADAEFQERLQEDTSFGGNLGRAVFQAKKRVLEPFGLVEEGAKTAPGKKRPVEQSPQEPDSSSGIGKTGQQPAKKRLNFGQTGDSESVPDPQPLGEPPAAPTSLGSNTMASGGGAPMADNNEGADGVGNSSGNWHCDSTWMGDRVITTSTRTWALPTYNNHLYKQISSQSGASNDNHYFGYSTPWGYFDFNRFHCHFSPRDWQRLINNNWGFRPKKLNFKLFNIQVKEVTQNEGTKTIANNLTSTIQVFTDSEYQLPYVLGSAHQGCLPPFPADVFMIPQYGYLTLNNGSQAVGRSSFYCLEYFPSQMLRTGNNFQFTYTFEDVPFHSSYAHSQSLDRLMNPLIDQYLYYLSRTQTTGGTTNTQTLGFSQGGPNTMANQAKNWLPGPCYRQQRVSKTSADNNNSEYSWTGATKYHLNGRDSLVNPGPAMASHKDDEEKFFPQSGVLIFGKQGSEKTNVDIEKVMITDEEEIRTTNPVATEQYGSVSTNLQRGNRQAATADVNTQGVLPGMVWQDRDVYLQGPIWAKIPHTDGHFHPSPLMGGFGLKNPPPQILIKNTPVPANPPAEFSATKFASFITQYSTGQVSVEIEWELQKENSKRWNPEVQYTSNYAKSANVDFTVDTNGVYSEPRPIGTRYLTRNL

SEQ ID NO: 5241 - DNA, 2214 bp, Artificial Sequence; identical to SEQ ID NO: 5231
  Description of Artificial Sequence: Synthetic polynucleotide

SEQ ID NO: 5242 - protein, 737 aa, Artificial Sequence; identical to SEQ ID NO: 5232
  Description of Artificial Sequence: Synthetic polypeptide

SEQ ID NO: 5243 - protein, 736 aa, Artificial Sequence; identical to SEQ ID NO: 5056
  Description of Artificial Sequence: Synthetic polypeptide

SEQ ID NO: 5244 - protein, 736 aa, Artificial Sequence
  Description of Artificial Sequence: Synthetic polypeptide
MAADGYLPDWLEDNLSEGIREWWDLKPGAPKPKANQQKQDDGRGLVLPGYKYLGPFNGLDKGEPVNAADAAALEHDKAYDQQLKAGDNPYLRYNHADAEFQERLQEDTSFGGNLGRAVFQAKKRVLEPLGLVEEGAKTAPGKKRPVEQSPQEPDSSSGIGKTGQQPAKKRLNFGQTGDSESVPDPQPLGEPPAAPSGLGPNTMASGGGAPMADNNEGADGVGNSSGNWHCDSTWLGDRVITTSTRTWALPTYNNHLYKQISNGTSGGSTNDNTYFGYSTPWGYFDFNRFHCHFSPRDWQRLINNNWGFRPKRLNFKLFNIQVKEVTTNEGTKTIANNLTSTVQVFTDSEYQLPYVLGSAHQGCLPPFPADVFMVPQYGYLTLNNGSQALGRSSFYCLEYFPSQMLRTGNNFQFSYTFEDVPFHSSYAHSQSLDRLMNPLIDQYLYYLVRTQTTGTGGTQTLAFSQAGPSSMANQARNWVPGPCYRQQRVSTTTNQNNNSNFAWTGAAKFKLNGRDSLMNPGVAMASHKDDEDRFFPSSGVLIFGKQGAGNDGVDYSQVLITDEEEIKATNPVATEEYGAVAINNQRANTQAQTGLVHNQGVIPGMVWQNRDVYLQGPIWAKIPHTDGNFHPSPLMGGFGLKHPPPQILIKNTPVPADPPLTFNQAKLNSFITQYSTGQVSVEIEWELQKENSKRWNPEIQYTSNYYKSTNVDFAVNTEGVYSEPRPIGTRYLTRNL

SEQ ID NO: 5245 - protein, 736 aa, Artificial Sequence
  Description of Artificial Sequence: Synthetic polypeptide
MAADGYLPDWLEDNLSEGIREWWDLKPGAPKPKANQQKQDDGRGLVLPGYKYLGPFNGLDKGEPVNAADAAALEHDKAYDQQLKAGDNPYLRYNHADAEFQERLQEDTSFGGNLGRAVFQAKKRVLEPLGLVEEGAKTAPGKKRPVEQSPQEPDSSSGIGKTGQQPAKKRLNFGQTGDSESVPDPQPLGEPPAAPSGLGPNTMASGGGAPMADNNEGADGVGNSSGNWHCDSTWLGDRVITTSTRTWALPTYNNHLYKQISNGTSGGSTNDNTYFGYSTPWGYFDFNRFHCHFSPRDWQRLINNNWGFRPKRLNFKLFNIQVKEVTTNEGTKTIANNLTSTVQVFTDSEYQLPYVLGSAHQGCLPPFPADVFMVPQYGYLTLNNGSQALGRSSFYCLEYFPSQMLRTGNNFQFSYTFEDVPFHSSYAHSQSLDRLMNPLIDQYLYYLVRTQTTGTGGTQTLAFSQAGPSSMANQARNWVPGPCYRQQRVSTTTNQNNNSNFAWTGAAKFKLNGRDSLMNPGVAMASHKDDEDAFFPSSGVLIFGKQGAGNDGVDYSQVLITDEEEIKATNPVATEEYGAVAINNQAANTQAQTGLVHNQGVIPGMVWQNRDVYLQGPIWAKIPHTDGNFHPSPLMGGFGLKHPPPQILIKNTPVPADPPLTFNQAKLNSFITQYSTGQVSVEIEWELQKENSKRWNPEIQYTSNYYKSTNVDFAVNTEGVYSEPRPIGTRYLTRNL

SEQ ID NO: 5246 - protein, 538 aa, Artificial Sequence
  Description of Artificial Sequence: Synthetic polypeptide
MRAAAGGNGGDAGQGAEGVGNASGDWHCDSTWSESHVTTTSTRTWVLPTYNNHLYLRLGSSNASDTFNGFSTPWGYFDFNRFHCHFSPRDWQRLINNHWGLRPKSMQVRIFNIQVKEVTTSNGETTVSNNLTSTVQIFADSTYELPYVMDAGQEGSLPPFPNDVFMVPQYGYCGLVTGGSSQNQTDRNAFYCLEYFPSQMLRTGNNFEMVYKFENVPFHSMYAHSQSLDRLMNPLLDQYLWELQSTTSGGTLNQGNSATNFAKLTKTNFSGYRKNWLPGPMMKQQRFSKTASQNYKIPQGRNNSLLHYETRTTLDGRWSNFAPGTAMATAANDATDFSQAQLIFAGPNITGNTTTDANNLMFTSEDELRATNPRDTDLFGHLATNQQNATTVPTVDDVDGVGVYPGMVWQDRDIYYQGPIWAKIPHTDGHFHPSPLIGGFGLKSPPPQIFIKNTPVPANPATTFSPARINSFITQYSTGQVAVKIEWEIQKERSKRWNPEVQFTSNYGAQDSLLWAPDNAGAYKEPRAIGSRYLTNHL

SEQ ID NO: 5247 - protein, 736 aa, Artificial Sequence
  Description of Artificial Sequence: Synthetic polypeptide
MSFVDHPPDWLESIGDGFREFLGLEAGPPKPKANQQKQDNARGLVLPGYKYLGPGNGLDKGDPVNFADEVAREHDLSYQKQLEAGDNPYLKYNHADAEFQEKLASDTSFGGNLGKAVFQAKKRILEPLGLVETPDKTAPAAKKRPLEQSPQEPDSSSGVGKKGKQPARKRLNFDDEPGAGDGPPPEGPSSGAMSTETEMRAAAGGNGGDAGQGAEGVGNASGDWHCDSTWSESHVTTTSTRTWVLPTYNNHLYLRLGSSNASDTFNGFSTPWGYFDFNRFHCHFSPRDWQRLINNHWGLRPKSMQVRIFNIQVKEVTTSNGETTVSNNLTSTVHIFADSTYELPYVMDAGQEGSLPPFPNDVFMVPQYGYCGLVTGGSSQNQTDRNAFYCLEYFPSQMLRTGNNFEMVYKFENVPFHSMYAHSQSLDRLMNPLLDQYLWELQSTTSGGTLNQGNSATNFAKLTNKNFSGYRKNWLPGPMMKQQRFSKTASQNYKIPQGGNNSLLHYETRTTLDRRWSNFAPGTAMATAANDATDFSQAQLIFAGPNITGNTTTDANNLMFTSEDELRATNPRDTDLFGHLATNQQNATTVPTVDDVDGVGVYPGMVWQDRDIYYQGPIWAKIPHTDGHFHPSPLIGGFGLKSPPPQIFIKNTPVPANPATTFSPARINSFITQYSTGQVAVKIEWEIQKERSKRWNPEVQFTSNYGAQDSLLWAPDNAGAYKEPRAIGSRYLTNHL

SEQ ID NO: 5248 - protein, 736 aa, Artificial Sequence
  Description of Artificial Sequence: Synthetic polypeptide
MSFVDHPPDWLESIGDGFREFLGLEAGPPKPKANQQKQDNARGLVLPGYKYLGPGNGLDKGDPVNFADEVAREHDLSYQKQLEAGDNPYLKYNHADAEFQEKLASDTSFGGNLGKAVFQAKKRILEPLGLVETPDKTAPAAKKRPLEQSPQEPDSSSGVGKKGKQPARKRLNFDDEPGAGDGPPPEGPSSGAMSTETEMRAAAGGNGGDAGQGAEGVGNASGDWHCDSTWSESHVTTTSTRTWVLPTYNNHLYLRLGSSNASDTFNGFSTPWGYFDFNRFHCHFSPRDWQRLINNHWGLRPKSMQVRIFNIQVKEVTTSNGETTVSNNLTSTVQIFADSTYELPYVMDAGQEGSLPPFPNDVFMVPQYGYCGLVTGGSSQNQTDRNAFYCLEYFPSQMLRTGNNFEMVYKFENVPFHSMYAHSQSLDRLMNPLLDQYLWELQSTTSGGTLNQGNSATNFAKLTKTNFSGYRKNWLPGPMMKQQRFSKTASQNYKIPQGRNNSLLHYETRTTLDGRWSNFAPGTAMATAANDATDFSQAQLIFAGPNITGNTTTDANNLMFTSEDELRATNPRDTDLFGHLATNQQNATTVPTVDDVDGVGVYPGMVWQDRDIYYQGPIWAKIPHTDGHFHPSPLIGGFGLKSPPPQIFIKNTPVPANPATTFSPARINSFITQYSTGQVAVKIEWEIQKERSKRWNPEVQFTSNYGAQDSLLWAPDNAGAYKEPRAIGSRYLTNHL

SEQ ID NO: 5249 - DNA, 2214 bp, Artificial Sequence
  Description of Artificial Sequence: Synthetic polynucleotide
atggctgccgatggttatcttccagattggctcgaggacactctctctgaaggaataagacagtggtggaagctcaaacctggcccaccaccaccaaagcccgcagagcggcataaggacgacagcaggggtcttgtgcttcctgggtacaagtacctcggacccttcaacggactcgacaagggagagccggtcaacgaggcagacgccgcggccctcgagcacgacaaagcctacgaccggcagctcgacagcggagacaacccgtacctcaagtacaaccacgccgacgcggagtttcaggagcgccttaaagaagatacgtcttttgggggcaacctcgggcgagcagtcttccaggccaaaaagaggcttcttgaacctcttggtctggttgaggaagcggctaagacggctcctggaaagaagaggcctgtagagcagtctcctcaggaaccggactcctcctcgggcatcggcaagacaggccagcagcccgctaaaaagagactcaatttcggtcagactggcgacacagagtcagtcccagaccctcaaccaatcggagaacctcccgcagccccctcaggtgtgggatctcttacaatggcttcaggtggtggcgcaccagtggcagacaataacgaaggtgccgatggagtgggtagttcctcgggaaattggcattgcgattcccaatggctgggggacagagtcatcaccaccagcacccgaacctgggccctgcccacctacaacaatcacctctacaagcaaatctccaacgggacatcgggaggagccaccaacgacaacacctacttcggctacagcaccccctgggggtattttgactttaacagattccactgccacttttcaccacgtgactggcagcgactcatcaacaacaactggggattccggcccaagagactcagcttcaagctcttcaacatccaggtcaaggaggtcacgcagaatgaaggcaccaagaccatcgccaataaccttaccagcacggtccaggtcttcacggactcggagtaccagctgccgtacgttctcggctctgcccaccagggctgcctgcctccgttcccggcggacgtgttcatgattccccagtacggctacctaacactcaacaacggtagtcaggccgtgggacgctcctccttctactgcctggaatactttccttcgcagatgctgagaaccggcaacaacttccagtttacttacaccttcgaggacgtgcctttccacagcagctacgcccacagccagagcttggaccggctgatgaatcctctgattgaccagtacctgtactacttgtctcggactcaaacaacaggaggcacggcaaatacgcagactctgggcttcagccaaggtgggcctaatacaatggccaatcaggcaaagaactggctgccaggaccctgttaccgccaacaacgcgtctcaacgacaaccgggcaaaacaacaatagcaactttgcctggactgctgggaccaaataccatctgaatggaagaaattcattggctaatcctggcatcgctatggcaacacacaaagacgacaaggagcgtttttttcccagtaacgggatcctgatttttggcaaacaaaatgctgccagagacaatgcggattacagcgatgtcatgctcaccagcgaggaagaaatcaaaaccactaaccctgtggctacagaggaatacggtatcgtggcagataacttgcagcagcaaaacacggctcctcaaattggaactgtcaacagccagggggccttacccggtatggtttggcagaaccgggacgtgtacctgcagggtcccatctgggccaagattcctcacacggacggcaacttccacccgtctccgctgatgggcggctttggcctgaaacatcctccgcctcagatcctgatcaagaacacgcctgtacctgcggatcctccgaccaccttcaaccagtcaaagctgaactctttcatcacgcaatacagcaccggacaggtcagcgtggaaattgaatgggagctgcagaaggaaaacagcaagcgctggaaccccgagatccagtacacctccaactactacaaatctacaagtgtggactttgctgttaatacagaaggcgtgtactctgaaccccaccccattggcacccgttacctcacccgtcccctgtaa

SEQ ID NO: 5250 - protein, 737 aa, Artificial Sequence
  Description of Artificial Sequence: Synthetic polypeptide
MAADGYLPDWLEDTLSEGIRQWWKLKPGPPPPKPAERHKDDSRGLVLPGYKYLGPFNGLDKGEPVNEADAAALEHDKAYDRQLDSGDNPYLKYNHADAEFQERLKEDTSFGGNLGRAVFQAKKRLLEPLGLVEEAAKTAPGKKRPVEQSPQEPDSSSGIGKTGQQPAKKRLNFGQTGDTESVPDPQPIGEPPAAPSGVGSLTMASGGGAPVADNNEGADGVGSSSGNWHCDSQWLGDRVITTSTRTWALPTYNNHLYKQISNGTSGGATNDNTYFGYSTPWGYFDFNRFHCHFSPRDWQRLINNNWGFRPKRLSFKLFNIQVKEVTQNEGTKTIANNLTSTVQVFTDSEYQLPYVLGSAHQGCLPPFPADVFMIPQYGYLTLNNGSQAVGRSSFYCLEYFPSQMLRTGNNFQFTYTFEDVPFHSSYAHSQSLDRLMNPLIDQYLYYLSRTQTTGGTANTQTLGFSQGGPNTMANQAKNWLPGPCYRQQRVSTTTGQNNNSNFAWTAGTKYHLNGRNSLANPGIAMATHKDDKERFFPSNGILIFGKQNAARDNADYSDVMLTSEEEIKTTNPVATEEYGIVADNLQQQNTAPQIGTVNSQGALPGMVWQNRDVYLQGPIWAKIPHTDGNFHPSPLMGGFGLKHPPPQILIKNTPVPADPPTTFNQSKLNSFITQYSTGQVSVEIEWELQKENSKRWNPEIQYTSNYYKSTSVDFAVNTEGVYSEPHPIGTRYLTRPL

SEQ ID NO: 5251 - protein, 736 aa, Artificial Sequence
  Description of Artificial Sequence: Synthetic polypeptide
MAADGYLPDWLEDNLSEGIREWWDLKPGAPKPKANQQKQDDGRGLVLPGYKYLGPFNGLDKGEPVNAADAAALEHDKAYDQQLKAGDNPYLRYNHADAEFQERLQEDTSFGGNLGRAVFQAKKRVLEPLGLVEEGAKTAPGKKRPVEQSPQEPDSSSGIGKTGQQPAKKRLNFGQTGDTESVPDPQPIGEPPAAPSGVGSLTMASGGGAPVADNNEGADGVGSSSGNWHCDSQWLGDRVITTSTRTWALPTYNNHLYKQISSASTGASNDNHYFGYSTPWGYFDFNRFHCHFSPRDWQRLINNNWGFRPKRLNFKLFNIQVKEVTDNNGVKTIANNLTSTVQVFTDSDYQLPYVLGSAHQGCLPPFPADVFMIPQYGYLTLNNGSQAVGRSSFYCLEYFPSQMLRTGNNFQFTYTFEDVPFHSSYAHSQSLDRLMNPLIDQYLYYLSRTQTTGGTANTQTLGFSQGGPNTMANQAKNWLPGPCYRQQRVSTTTGQNNNSNFAWTAGTKYHLNGRNSLANPGIAMATHKDDKERFFPSNGILIFGKQNAARDNADYSDVMLTSEEEIKTTNPVATEEYGIVADNLQQQNTAPQIGTVNSQGALPGMVWQNRDVYLQGPIWAKIPHTDGNFHPSPLMGGFGLKHPPPQILIKNTPVPADPPTTFNQSKLNSFITQYSTGQVSVEIEWELQKENSKRWNPEIQYTSNYYKSTSVDFAVNTEGVYSEPHPIGTRYLTRPL

SEQ ID NO: 5252 - protein, 736 aa, Artificial Sequence
  Description of Artificial Sequence: Synthetic polypeptide
MAADGYLPDWLEDTLSEGIRQWWKLKPGPPPPKPAERHKDDSRGLVLPGYKYLGPFNGLDKGEPVNEADAAALEHDKAYDRQLDSGDNPYLKYNHADAEFQERLQGDTSFGGNLGRAVFQAKKRVLEPLGLVEEGAKTAPGKKRPVEQSPQEPDSSSGIGETGQQPAKKRLNFGQTGDSESVPDPQPLGEPPATPAAVGPTTMASGGGAPMADNNEGADGVGSSSGNWHCDSQWLGDRVITTSTRTWALPTYNNHLYKQISSASTGASNDNHYFGYSTPWGYFDFNRFHCHFSPRDWQRLINNNWGFRPKRLSFKLFNIQVKEVTDNNGVKTIANNLTSTVQVFTDSEYQLPYVLGSAHQGCLPPFPADVFMIPQYGYLTLNNGSQAVGRSSFYCLEYFPSQMLRTGNNFTFSYTFEDVPFHSSYAHSQSLDRLMNPLIDQYLYYLSRTQTTGGTANTQTLGFSQGGPNTMANQAKNWLPGPCYRQQRVSTTTGQNNNSNFAWTAGTKYHLNGRNSLANPGIAMATHKDDKERFFPSNGILIFGKQNAARDNADYSDVMLTSEEEIKTTNPVATEEYGIVADNLQQQNTAPQIGTVNSQGALPGMVWQNRDVYLQGPIWAKIPHTDGNFHPSPLMGGFGLKHPPPQILIKNTPVPADPPTTFNQSKLNSFITQYSTGQVSVEIEWELQKENSKRWNPEIQYTSNYYKSTSVDFAVNTEGVYSEPHPIGTRYLTRPL

SEQ ID NO: 5253 - DNA, 2181 bp, Artificial Sequence
  Description of Artificial Sequence: Synthetic polynucleotide
atgtcttttgttgatcaccctccagattggttggaagaagttggtgaaggtcttcgcgagtttttgggccttgaagcgggcccaccgaaaccaaaacccaatcagcagcatcaagatcaagcccgtggtcttgtgctgcctggttataactatctcggacccggaaacggtctcgatcgaggagagcctgtcaacagggcagacgaggtcgcgcgagagcacgacatctcgtacaacgagcagcttgaggcgggagacaacccctacctcaagtacaaccacgcggacgccgagtttcaggagaagctcgccgacgacacatccttcgggggaaacctcggaaaggcagtctttcaggccaagaaaagggttctcgaaccttttggcctggttgaagagggtgctaagacggcccctaccggaaagcggatagacgaccactttccaaaaagaaagaaggctcggaccgaagaggactccaagccttccacctcgtcagacgccgaagctggacccagcggatcccagcagctgcaaatcccagcacaaccagcctcaagtttgggagctgatacaatgtctgcgggaggtggcggcccattgggcgacaataaccaaggtgccgatggagtgggcaatgcctcgggagattggcattgcgattccacgtggatgggggacagagtcgtcaccaagtccacccgcacctgggtgctgcccagctacaacaaccaccagtaccgagagatcaaaagcggctccgtcgacggaagcaacgccaacgcctactttggatacagcaccccctgggggtactttgactttaaccgcttccacagccactggagcccccgagactggcaaagactcatcaacaactattggggcttcagaccccggtctctcagagtcaaaatcttcaacatccaagtcaaagaggtcacggtgcaggactccaccaccaccatcgccaacaacctcacctccaccgtccaagtgtttacggacgacgactaccaactcccgtacgtcgtcggcaacgggaccgagggatgcctgccggccttccccccgcaggtctttacgctgccgcagtacggctacgcgacgctgaaccgagacaacggagacaacccgacagagcggagcagcttcttttgcctagagtactttcccagcaagatgctgaggacgggcaacaactttgagtttacctacagctttgaagaggtgcccttccactgcagcttcgccccgagccagaacctctttaagctggccaacccgctggtggaccagtacctgtaccgcttcgtgagcacctcggccacgggcgccatccagttccaaaagaacctggcgggcagatacgccaacacctacaaaaactggttcccggggcccatgggccgaacccagggctggaacacgagctctggggtcagcagcaccaacagagtcagcgtcaacaacttttccgtctcaaaccggatgaacctggagggggccagctaccaagtgaacccccagcccaacgggatgacaaacacgctccaaggcagcaaccgctacgcgctggaaaacaccatgatcttcaacgctcaaaacgccacgccgggaactacctcggtgtacccagaggacaatctactgctgaccagcgagagcgagactcagcccgtcaaccgggtggcttacaacacgggcggtcagatggccaccaacgcccagaacgccaccacggctcccacggtcgggacctacaacctccaggaagtgcttcctggcagcgtatggatggagagggacgtgtacctccaaggacccatctgggccaagatcccagagacgggggcgcactttcacccctctccggccatgggcggattcggactcaaacacccgccgcccatgatgctcatcaaaaacacgccggtgcccggcaacatcaccagcttctcggacgtgcccgtcagcagcttcatcacccagtacagcaccgggcaggtcaccgtggagatggaatgggagctcaaaaaggaaaactccaagaggtggaacccagagatccagtacaccaacaactacaacgacccccagtttgtggactttgctccagacggctccggcgaatacagaaccaccagagccatcggaacccgatacctcacccgacccctt

SEQ ID NO: 5254 - protein, 726 aa, Artificial Sequence
  Description of Artificial Sequence: Synthetic polypeptide
MSFVDHPPDWLEEVGEGLREFLGLEAGPPKPKPNQQHQDQARGLVLPGYNYLGPGNGLDRGEPVNRADEVAREHDISYNEQLEAGDNPYLKYNHADAEFQEKLADDTSFGGNLGKAVFQAKKRVLEPFGLVEEGAKTAPTGKRIDDHFPKRKKARTEEDSKPSTSSDAEAGPSGSQQLQIPAQPASSLGADTMSAGGGGPLGDNNQGADGVGNASGDWHCDSTWMGDRVVTKSTRTWVLPSYNNHQYREIKSGSVDGSNANAYFGYSTPWGYFDFNRFHSHWSPRDWQRLINNYWGFRPRSLRVKIFNIQVKEVTVQDSTTTIANNLTSTVQVFTDDDYQLPYVVGNGTEGCLPAFPPQVFTLPQYGYATLNRDNGDNPTERSSFFCLEYFPSKMLRTGNNFEFTYSFEEVPFHCSFAPSQNLFKLANPLVDQYLYRFVSTSATGAIQFQKNLAGRYANTYKNWFPGPMGRTQGWNTSSGSSTNRVSVNNFSVSNRMNLEGASYQVNPQPNGMTNTLQGSNRYALENTMIFNAQNATPGTTSVYPEDNLLLTSESETQPVNRVAYNTGGQMATNAQNATTAPTVGTYNLQEVLPGSVWMERDVYLQGPIWAKIPETGAHFHPSPAMGGFGLKHPPPMMLIKNTPVPGNITSFSDVPVSSFITQYSTGQVTVEMEWELKKENSKRWNPEIQYTNNYNDPQFVDFAPDGSGEYRTTRAIGTRYLTRPL

SEQ ID NO: 5255 - protein, 735 aa, Artificial Sequence
  Description of Artificial Sequence: Synthetic polypeptide
MAADGYLPDWLEDTLSEGIRQWWKLKPGPPPPKPAERHKDDSRGLVLPGYKYLGPFNGLDKGEPVNEADAAALEHDKAYDRQLDSGDNPYLKYNHADAEFQERLKEDTSFGGNLGRAVFQAKKRILEPLGLVEEPVKTAPGKKRPVEHSPAEPDSSSGTGKSGQQPARKRLNFGQTGDADSVPDPQPLGQPPAAPSGLGTNTMASGSGAPMADNNEGADGVGNSSGNWHCDSTWMGDRVITTSTRTWALPTYNNHLYKQISSQSGASNDNHYFGYSTPWGYFDFNRFHCHFSPRDWQRLINNNWGFRPKRLSFKLFNIQVKEVTQNDGTTTIANNLTSTVQVFTDSEYQLPYVLGSAHQGCLPPFPADVFMVPQYGYLTLNNGSQAVGRSSFYCLEYFPSQMLRTGNNFTFSYTFEDVPFHSSYAHSQSLDRLMNPLIDQYLYYLSRTNTPSGTTTMSRLQFSQAGASDIRDQSRNWLPGPCYRQQRVSKTAADNNNSDYSWTGATKYHLNGRDSLVNPGPAMASHKDDEEKYFPQSGVLIFGKQDSGKTNVDIEKVMITDEEEIRTTNPVATEQYGSVSTNLQSGNTQAATSDVNTQGVLPGMVWQDRDVYLQGPIWAKIPHTDGHFHPSPLMGGFGLKHPPPQILIKNTPVPANPSTTFSAAKFASFITQYSTGQVSVEIEWELQKENSKRWNPEIQYTSNYNKSVNVDFTVDTNGVYSEPRPIGTRYLTRNL

SEQ ID NO: 5256 - DNA, 1803 bp, Bovine adeno-associated virus
acggcgcctgcggcaaaaaagaggcctctagagcagagtcctcaagagccagactcctcgagcggagttggcaagaaaggcaaacagcctgccagaaagagactcaactttgacgacgaacctggagccggagacgggcctcccccagaaggaccatcttccggagctatgtctactgagactgaaatgcgtgcagcagctggcggaaatggtggcgatgcgggacaaggtgccgagggagtgggtaatgcctccggtgattggcattgcgattccacttggtcagagagccacgtcaccaccacctcaacccgcacctgggtcctgccgacctacaacaaccacctgtacctgcggctcggctcgagcaacgccagcgacaccttcaacggattctccaccccctggggatactttgactttaaccgcttccactgccacttctcgccaagagactggcaaaggctcatcaacaaccactggggactgcgccccaaaagcatgcaagtccgcatcttcaacatccaagttaaggaggtcacgacgtctaacggggagacgaccgtatccaacaacctcaccagcacggtccagatctttgcggacagcacgtacgagctcccgtacgtgatggatgcaggtcaggagggcagcttgcctcctttccccaacgacgtgttcatggtgcctcagtacgggtactgcggactggtaaccggaggcagctctcaaaaccagacagacagaaatgccttctactgtctggagtactttcccagccagatgctgagaaccggaaacaactttgagatggtgtacaagtttgaaaacgtgcccttccactccatgtacgctcacagccagagcctggataggctgatgaacccgctgctggaccagtacctgtgggagctccagtctaccacctctggaggaactctcaaccagggcaattcagccaccaactttgccaagctgaccaaaacaaacttttctggctaccgcaaaaactggctcccggggcccatgatgaagcagcagagattctccaagactgccagtcaaaactacaagattccccagggaagaaacaacagtctgctccattatgagaccagaactaccctcgacggaagatggagcaattttgccccgggaacggccatggcaaccgcagccaacgacgccaccgacttctctcaggcccagctcatctttgcggggcccaacatcaccggcaacaccaccacagatgccaataacctgatgttcacttcagaagatgaacttagggccaccaacccccgggacactgacctgtttggccacctggcaaccaaccagcaaaacgccaccaccgttcctaccgtagacgacgtggacggagtcggcgtgtacccgggaatggtgtggcaggacagagacatttactaccaagggcccatttgggccaaaattccacacacggatggacactttcacccgtctcctctcattggcggatttggactgaaaagcccgcctccacaaatattcatcaaaaacactcctgtacccgccaatcccgcaacgaccttctctccggccagaatcaacagcttcatcacccagtacagcaccggacaggtggctgtcaaaatagaatgggaaatccagaaggagcggtccaagagatggaacccagaggtccagttcacgtccaactacggagcacaggactcgcttctctgggctcccgacaacgccggagcctacaaagagcccagggccattggatcccgatacctcaccaaccacctctag

SEQ ID NO: 5257 - DNA, 1617 bp, Bovine adeno-associated virus
atgcgtgcagcagctggcggaaatggtggcgatgcgggacaaggtgccgagggagtgggtaatgcctccggtgattggcattgcgattccacttggtcagagagccacgtcaccaccacctcaacccgcacctgggtcctgccgacctacaacaaccacctgtacctgcggctcggctcgagcaacgccagcgacaccttcaacggattctccaccccctggggatactttgactttaaccgcttccactgccacttctcgccaagagactggcaaaggctcatcaacaaccactggggactgcgccccaaaagcatgcaagtccgcatcttcaacatccaagttaaggaggtcacgacgtctaacggggagacgaccgtatccaacaacctcaccagcacggtccagatctttgcggacagcacgtacgagctcccgtacgtgatggatgcaggtcaggagggcagcttgcctcctttccccaacgacgtgttcatggtgcctcagtacgggtactgcggactggtaaccggaggcagctctcaaaaccagacagacagaaatgccttctactgtctggagtactttcccagccagatgctgagaaccggaaacaactttgagatggtgtacaagtttgaaaacgtgcccttccactccatgtacgctcacagccagagcctggataggctgatgaacccgctgctggaccagtacctgtgggagctccagtctaccacctctggaggaactctcaaccagggcaattcagccaccaactttgccaagctgaccaaaacaaacttttctggctaccgcaaaaactggctcccggggcccatgatgaagcagcagagattctccaagactgccagtcaaaactacaagattccccagggaagaaacaacagtctgctccattatgagaccagaactaccctcgacggaagatggagcaattttgccccgggaacggccatggcaaccgcagccaacgacgccaccgacttctctcaggcccagctcatctttgcggggcccaacatcaccggcaacaccaccacagatgccaataacctgatgttcacttcagaagatgaacttagggccaccaacccccgggacactgacctgtttggccacctggcaaccaaccagcaaaacgccaccaccgttcctaccgtagacgacgtggacggagtcggcgtgtacccgggaatggtgtggcaggacagagacatttactaccaagggcccatttgggccaaaattccacacacggatggacactttcacccgtctcctctcattggcggatttggactgaaaagcccgcctccacaaatattcatcaaaaacactcctgtacccgccaatcccgcaacgaccttctctccggccagaatcaacagcttcatcacccagtacagcaccggacaggtggctgtcaaaatagaatgggaaatccagaaggagcggtccaagagatggaacccagaggtccagttcacgtccaactacggagcacaggactcgcttctctgggctcccgacaacgccggagcctacaaagagcccagggccattggatcccgatacctcaccaaccacctctag

SEQ ID NO: 5258 - DNA, 1173 bp, Bovine adeno-associated virus
atggcgctggtaagctggctggtggaacatggcatcacttccgagaagcagtggattcaggagaatcaggagagctacctgtccttcaactccacgggaaactctcggagccagattaaagccgcgcttgacaacgcgtcaaaaattatgagtctgaccaaatctgcctcagactatctcgtgggacagactgttccagaggacatttctgaaaacagaatctggcagatttttgatctcaacggctacgacccggcatacgcgggctctgttctctacggctggtgcactcgcgcctttggaaagaggaacaccgtctggctgtatggacccgcgaccaccggaaagaccaacatcgcggaagccatctctcacaccgtgcccttttatggctgtgtgaactggactaatgagaactttccctttaatgactgtgtggaaaaaatgttgatctggtgggaggagggaaagatgaccagcaaggtggtggaacccgccaaggccatcttgggggggtctagagtacgagtggatcaaaaatgtaaatcctctgtacaagtagactctaccccggtgattatcacctccaatactaacatgtgtgtggtggtggatgggaactccacgacctttgaacaccagcagccgctggaagaccgcatgttcagatttgaactcatgcggcggctcccgccagattttggcaagattaccaagcaggaagtcaaagacttttttgcttgggcaaaggtcaaccaggtgccggtgactcacgagtttatggttcccaagaaagtggcgggaactgagagggcggagacttctagaaaacgcccactggatgacgtcaccaataccaactataaaagtccggagaagcgggcccggctctcagttgttcctgagacgcctcgcagttcagacgtgcctgtagagcccgctcctctgcgacctctcaactggtcttccaggtatgaatgcagatgtgactatcatgctaaatttgactctgtaacgggggaatgtgacgagtgtgaatatttgaatcggggcaaaaatggctgtatctttcataatgctacacattgtcaaatttgtcacgctgttcctccatgggaaaaggaaaatgtgtcagattttaatgattttgatgactgtaataaagagcagtaa

SEQ ID NO: 5259 - DNA, 1833 bp, Bovine adeno-associated virus
atggctaccttctatgaagtcattgttcgcgttccatttgatgtggaagagcacctgcctggaatttctgacaactttgtagactgggtaactggtcaaatttgggagctgcctcccgagtcagatttgaatttgactctgattgagcagcctcagctgacggtggctgacagaattcgccgcgtgttcctgtacgagtggaacaaattttccaagcaggagagcaaattctttgtgcagtttgaaaagggatctgaatattttcatctgcacacgctcgtggagacctccggcatctcttctatggtccttggccgctacgtgagtcagattcgcgcccagctggtgaaggtggtgttccagaacattgagccgcggattaacgactgggtcgccatcaccaaggtaaagaagggcggagccaataaggtggtggattctgggtatattcccgcctacctgctgccgaaggtccaaccagagcttcagtgggcgtggactaacctcgaagagtataaattggccgccctcaatctggaggagcgcaaacggctcgtcgctcagtttcagcttgagtcctcgcagcgctcgcaagaggcatcttcccagagggacgtttcggctgacccggtcatcaagagcaagacttcccagaaatacatggcgctggtaagctggctggtggaacatggcatcacttccgagaagcagtggattcaggagaatcaggagagctacctgtccttcaactccacgggaaactctcggagccagattaaagccgcgcttgacaacgcgtcaaaaattatgagtctgaccaaatctgcctcagactatctcgtgggacagactgttccagaggacatttctgaaaacagaatctggcagatttttgatctcaacggctacgacccggcatacgcgggctctgttctctacggctggtgcactcgcgcctttggaaagaggaacaccgtctggctgtatggacccgcgaccaccggaaagaccaacatcgcggaagccatctctcacaccgtgcccttttatggctgtgtgaactggactaatgagaactttccctttaatgactgtgtggaaaaaatgttgatctggtgggaggagggaaagatgaccagcaaggtggtggaacccgccaaggccatcttgggggggtctagagtacgagtggatcaaaaatgtaaatcctctgtacaagtagactctaccccggtgattatcacctccaatactaacatgtgtgtggtggtggatgggaactccacgacctttgaacaccagcagccgctggaagaccgcatgttcagatttgaactcatgcggcggctcccgccagattttggcaagattaccaagcaggaagtcaaagacttttttgcttgggcaaaggtcaaccaggtgccggtgactcacgagtttatggttcccaagaaagtggcgggaactgagagggcggagacttctagaaaacgcccactggatgacgtcaccaataccaactataaaagtccggagaagcgggcccggctctcagttgttcctgagacgcctcgcagttcagacgtgcctgtagagcccgctcctctgcgacctctcaactggtcttccaggtatgaatgcagatgtgactatcatgctaaatttgactctgtaacgggggaatgtgacgagtgtgaatatttgaatcggggcaaaaatggctgtatctttcataatgctacacattgtcaaatttgtcacgctgttcctccatgggaaaaggaaaatgtgtcagattttaatgattttgatgactgtaataaagagcagtaa

SEQ ID NO: 5260 - DNA, 2211 bp, Bovine adeno-associated virus
atgtcttttgttgaccaccctccagattggttggaatcgatcggcgacggctttcgtgaatttctcggccttgaggcgggtcccccgaaacccaaggccaatcaacagaagcaagataacgctcgaggtcttgtgcttcctgggtacaagtatcttggtcctgggaacggccttgataagggcgatcctgtcaattttgctgacgaggttgcccgagagcacgacctctcctaccagaaacagcttgaggcgggcgataacccttacctcaagtacaaccacgcggacgcagagtttcaggagaaactcgcttctgacacttcttttgggggaaaccttgggaaggctgttttccaggctaaaaagaggattctcgaacctcttggcctggttgagacgccggataaaacggcgcctgcggcaaaaaagaggcctctagagcagagtcctcaagagccagactcctcgagcggagttggcaagaaaggcaaacagcctgccagaaagagactcaactttgacgacgaacctggagccggagacgggcctcccccagaaggaccatcttccggagctatgtctactgagactgaaatgcgtgcagcagctggcggaaatggtggcgatgcgggacaaggtgccgagggagtgggtaatgcctccggtgattggcattgcgattccacttggtcagagagccacgtcaccaccacctcaacccgcacctgggtcctgccgacctacaacaaccacctgtacctgcggctcggctcgagcaacgccagcgacaccttcaacggattctccaccccctggggatactttgactttaaccgcttccactgccacttctcgccaagagactggcaaaggctcatcaacaaccactggggactgcgccccaaaagcatgcaagtccgcatcttcaacatccaagttaaggaggtcacgacgtctaacggggagacgaccgtatccaacaacctcaccagcacggtccagatctttgcggacagcacgtacgagctcccgtacgtgatggatgcaggtcaggagggcagcttgcctcctttccccaacgacgtgttcatggtgcctcagtacgggtactgcggactggtaaccggaggcagctctcaaaaccagacagacagaaatgccttctactgtctggagtactttcccagccagatgctgagaaccggaaacaactttgagatggtgtacaagtttgaaaacgtgcccttccactccatgtacgctcacagccagagcctggataggctgatgaacccgctgctggaccagtacctgtgggagctccagtctaccacctctggaggaactctcaaccagggcaattcagccaccaactttgccaagctgaccaaaacaaacttttctggctaccgcaaaaactggctcccggggcccatgatgaagcagcagagattctccaagactgccagtcaaaactacaagattccccagggaagaaacaacagtctgctccattatgagaccagaactaccctcgacggaagatggagcaattttgccccgggaacggccatggcaaccgcagccaacgacgccaccgacttctctcaggcccagctcatctttgcggggcccaacatcaccggcaacaccaccacagatgccaataacctgatgttcacttcagaagatgaacttagggccaccaacccccgggacactgacctgtttggccacctggcaaccaaccagcaaaacgccaccaccgttcctaccgtagacgacgtggacggagtcggcgtgtacccgggaatggtgtggcaggacagagacatttactaccaagggcccatttgggccaaaattccacacacggatggacactttcacccgtctcctctcattggcggatttggactgaaaagcccgcctccacaaatattcatcaaaaacactcctgtacccgccaatcccgcaacgaccttctctccggccagaatcaacagcttcatcacccagtacagcaccggacaggtggctgtcaaaatagaatgggaaatccagaaggagcggtccaagagatggaacccagaggtccagttcacgtccaactacggagcacaggactcgcttctctgggctcccgacaacgccggagcctacaaagagcccagggccattggatcccgatacctcaccaaccacctctag

SEQ ID NO: 5261 - DNA, 4694 bp, Bovine adeno-associated virus
gtggcactcccccccctgtcgcgttcgctcgttcgctggctcgattgggggggtggcagctcaaagagctgccagacgacggccctctgggccgtcgcccccccaatcgagccagcgaacgagcgaacgcgacaggggggggagtgccacactctctagcaagggggttttgtaggtggtgatgtcattgttgatgtcattatagttgtcacgcgatagttaatgattaacagtcatgtgatgtgtgttatccaataggatgaaagcgcgcgaatgagatctcgcgagacttccggggtataaaaggggtgagtgaacgagcccgccgccattctctgctctggactgctagaggaccctcgctgccatggctaccttctatgaagtcattgttcgcgttccatttgatgtggaagagcacctgcctggaatttctgacaactttgtagactgggtaactggtcaaatttgggagctgcctcccgagtcagatttgaatttgactctgattgagcagcctcagctgacggtggctgacagaattcgccgcgtgttcctgtacgagtggaacaaattttccaagcaggagagcaaattctttgtgcagtttgaaaagggatctgaatattttcatctgcacacgctcgtggagacctccggcatctcttctatggtccttggccgctacgtgagtcagattcgcgcccagctggtgaaggtggtgttccagaacattgagccgcggattaacgactgggtcgccatcaccaaggtaaagaagggcggagccaataaggtggtggattctgggtatattcccgcctacctgctgccgaaggtccaaccagagcttcagtgggcgtggactaacctcgaagagtataaattggccgccctcaatctggaggagcgcaaacggctcgtcgctcagtttcagcttgagtcctcgcagcgctcgcaagaggcatcttcccagagggacgtttcggctgacccggtcatcaagagcaagacttcccagaaatacatggcgctggtaagctggctggtggaacatggcatcacttccgagaagcagtggattcaggagaatcaggagagctacctgtccttcaactccacgggaaactctcggagccagattaaagccgcgcttgacaacgcgtcaaaaattatgagtctgaccaaatctgcctcagactatctcgtgggacagactgttccagaggacatttctgaaaacagaatctggcagatttttgatctcaacggctacgacccggcatacgcgggctctgttctctacggctggtgcactcgcgcctttggaaagaggaacaccgtctggctgtatggacccgcgaccaccggaaagaccaacatcgcggaagccatctctcacaccgtgcccttttatggctgtgtgaactggactaatgagaactttccctttaatgactgtgtggaaaaaatgttgatctggtgggaggagggaaagatgaccagcaaggtggtggaacccgccaaggccatcttgggggggtctagagtacgagtggatcaaaaatgtaaatcctctgtacaagtagactctaccccggtgattatcacctccaatactaacatgtgtgtggtggtggatgggaactccacgacctttgaacaccagcagccgctggaagaccgcatgttcagatttgaactcatgcggcggctcccgccagattttggcaagattaccaagcaggaagtcaaagacttttttgcttgggcaaaggtcaaccaggtgccggtgactcacgagtttatggttcccaagaaagtggcgggaactgagagggcggagacttctagaaaacgcccactggatgacgtcaccaataccaactataaaagtccggagaagcgggcccggctctcagttgttcctgagacgcctcgcagttcagacgtgcctgtagagcccgctcctctgcgacctctcaactggtcttccaggtatgaatgcagatgtgactatcatgctaaatttgactctgtaacgggggaatgtgacgagtgtgaatatttgaatcggggcaaaaatggctgtatctttcataatgctacacattgtcaaatttgtcacgctgttcctccatgggaaaaggaaaatgtgtcagattttaatgattttgatgactgtaataaagagcagtaaataaagtgagtagtcatgtcttttgttgaccaccctccagattggttggaatcgatcggcgacggctttcgtgaatttctcggccttgaggcgggtcccccgaaacccaaggccaatcaacagaagcaagataacgctcgaggtcttgtgcttcctgggtacaagtatcttggtcctgggaacggccttgataagggcgatcctgtcaattttgctgacgaggttgcccgagagcacgacctctcctaccagaaacagcttgaggcgggcgataacccttacctcaagtacaaccacgcggacgcagagtttcaggagaaactcgcttctgacacttcttttgggggaaaccttgggaaggctgttttccaggctaaaaagaggattctcgaacctcttggcctggttgagacgccggataaaacggcgcctgcggcaaaaaagaggcctctagagcagagtcctcaagagccagactcctcgagcggagttggcaagaaaggcaaacagcctgccagaaagagactcaactttgacgacgaacctggagccggagacgggcctcccccagaaggaccatcttccggagctatgtctactgagactgaaatgcgtgcagcagctggcggaaatggtggcgatgcgggacaaggtgccgagggagtgggtaatgcctccggtgattggcattgcgattccacttggtcagagagccacgtcaccaccacctcaacccgcacctgggtcctgccgacctacaacaaccacctgtacctgcggctcggctcgagcaacgccagcgacaccttcaacggattctccaccccctggggatactttgactttaaccgcttccactgccacttctcgccaagagactggcaaaggctcatcaacaaccactggggactgcgccccaaaagcatgcaagtccgcatcttcaacatccaagttaaggaggtcacgacgtctaacggggagacgaccgtatccaacaacctcaccagcacggtccagatctttgcggacagcacgtacgagctcccgtacgtgatggatgcaggtcaggagggcagcttgcctcctttccccaacgacgtgttcatggtgcctcagtacgggtactgcggactggtaaccggaggcagctctcaaaaccagacagacagaaatgccttctactgtctggagtactttcccagccagatgctgagaaccggaaacaactttgagatggtgtacaagtttgaaaacgtgcccttccactccatgtacgctcacagccagagcctggataggctgatgaacccgctgctggaccagtacctgtgggagctccagtctaccacctctggaggaactctcaaccagggcaattcagccaccaactttgccaagctgaccaaaacaaacttttctggctaccgcaaaaactggctcccggggcccatgatgaagcagcagagattctccaagactgccagtcaaaactacaagattccccagggaagaaacaacagtctgctccattatgagaccagaactaccctcgacggaagatggagcaattttgccccgggaacggccatggcaaccgcagccaacgacgccaccgacttctctcaggcccagctcatctttgcggggcccaacatcaccggcaacaccaccacagatgccaataacctgatgttcacttcagaagatgaacttagggccaccaacccccgggacactgacctgtttggccacctggcaaccaaccagcaaaacgccaccaccgttcctaccgtagacgacgtggacggagtcggcgtgtacccgggaatggtgtggcaggacagagacatttactaccaagggcccatttgggccaaaattccacacacggatggacactttcacccgtctcctctcattggcggatttggactgaaaagcccgcctccacaaatattcatcaaaaacactcctgtacccgccaatcccgcaacgaccttctctccggccagaatcaacagcttcatcacccagtacagcaccggacaggtggctgtcaaaatagaatgggaaatccagaaggagcggtccaagagatggaacccagaggtccagttcacgtccaactacggagcacaggactcgcttctctgggctcccgacaacgccggagcctacaaagagcccagggccattggatcccgatacctcaccaaccacctctagcccaattctgttgcataccctcaataaaccgtgtattcgtttcagtaaaatactgcctcttgtggtcattcggcgtacaacagcttacaacaacaacaaaacccccttgctagagagtgtggcactcccccccctgtcgcgttcgctcgttcgctggctcgattgggggggtggcagctcaaagagctgccagacgacggccctctgggccgtcgcccccccaatcgagccagcgaacgagcgaacgcgacaggggggggagtgccac

SEQ ID NO: 5262 - protein, 390 aa, Bovine adeno-associated virus
MALVSWLVEHGITSEKQWIQENQESYLSFNSTGNSRSQIKAALDNASKIMSLTKSASDYLVGQTVPEDISENRIWQIFDLNGYDPAYAGSVLYGWCTRAFGKRNTVWLYGPATTGKTNIAEAISHTVPFYGCVNWTNENFPFNDCVEKMLIWWEEGKMTSKVVEPAKAILGGSRVRVDQKCKSSVQVDSTPVIITSNTNMCVVVDGNSTTFEHQQPLEDRMFRFELMRRLPPDFGKITKQEVKDFFAWAKVNQVPVTHEFMVPKKVAGTERAETSRKRPLDDVTNTNYKSPEKRARLSVVPETPRSSDVPVEPAPLRPLNWSSRYECRCDYHAKFDSVTGECDECEYLNRGKNGCIFHNATHCQICHAVPPWEKENVSDFNDFDDCNKEQ

SEQ ID NO: 5263 - protein, 610 aa, Bovine adeno-associated virus
MATFYEVIVRVPFDVEEHLPGISDNFVDWVTGQIWELPPESDLNLTLIEQPQLTVADRIRRVFLYEWNKFSKQESKFFVQFEKGSEYFHLHTLVETSGISSMVLGRYVSQIRAQLVKVVFQNIEPRINDWVAITKVKKGGANKVVDSGYIPAYLLPKVQPELQWAWTNLEEYKLAALNLEERKRLVAQFQLESSQRSQEASSQRDVSADPVIKSKTSQKYMALVSWLVEHGITSEKQWIQENQESYLSFNSTGNSRSQIKAALDNASKIMSLTKSASDYLVGQTVPEDISENRIWQIFDLNGYDPAYAGSVLYGWCTRAFGKRNTVWLYGPATTGKTNIAEAISHTVPFYGCVNWTNENFPFNDCVEKMLIWWEEGKMTSKVVEPAKAILGGSRVRVDQKCKSSVQVDSTPVIITSNTNMCVVVDGNSTTFEHQQPLEDRMFRFELMRRLPPDFGKITKQEVKDFFAWAKVNQVPVTHEFMVPKKVAGTERAETSRKRPLDDVTNTNYKSPEKRARLSVVPETPRSSDVPVEPAPLRPLNWSSRYECRCDYHAKFDSVTGECDECEYLNRGKNGCIFHNATHCQICHAVPPWEKENVSDFNDFDDCNKEQ

SEQ ID NO: 5264 - protein, 736 aa, Bovine adeno-associated virus; identical to SEQ ID NO: 5248

SEQ ID NO: 5265 - protein, 600 aa, Bovine adeno-associated virus
TAPAAKKRPLEQSPQEPDSSSGVGKKGKQPARKRLNFDDEPGAGDGPPPEGPSSGAMSTETEMRAAAGGNGGDAGQGAEGVGNASGDWHCDSTWSESHVTTTSTRTWVLPTYNNHLYLRLGSSNASDTFNGFSTPWGYFDFNRFHCHFSPRDWQRLINNHWGLRPKSMQVRIFNIQVKEVTTSNGETTVSNNLTSTVQIFADSTYELPYVMDAGQEGSLPPFPNDVFMVPQYGYCGLVTGGSSQNQTDRNAFYCLEYFPSQMLRTGNNFEMVYKFENVPFHSMYAHSQSLDRLMNPLLDQYLWELQSTTSGGTLNQGNSATNFAKLTKTNFSGYRKNWLPGPMMKQQRFSKTASQNYKIPQGRNNSLLHYETRTTLDGRWSNFAPGTAMATAANDATDFSQAQLIFAGPNITGNTTTDANNLMFTSEDELRATNPRDTDLFGHLATNQQNATTVPTVDDVDGVGVYPGMVWQDRDIYYQGPIWAKIPHTDGHFHPSPLIGGFGLKSPPPQIFIKNTPVPANPATTFSPARINSFITQYSTGQVAVKIEWEIQKERSKRWNPEVQFTSNYGAQDSLLWAPDNAGAYKEPRAIGSRYLTNHL

SEQ ID NO: 5266 - DNA, 14832 bp, Homo sapiens
tcaagactaagtcaaaggaggagagggcaacgcggtgggcaggagagaggccaacggccgcccggggcgaggggagccggtaggacgggaccaggactggccgacccggccccgcgcggggaagggggcgccttcctcccacaacacaaaacggtgcgcccgggttggccgcccctccccagtggtgcggccccgggtggacgcttccgtgcgcgcgtccatgcccagccattgcgggctgcgggctccaagggtcgcacacgctggagagtgcaggttgccgggtccacccacagggctgtagacacccctagggtcacacagacaaggctctggacacccacaggggcacacacattggggagtgggcactcctgggctcacaaagactgaggcgcaggaaggtagggcgcgcccgcccagagggagttggtggtggctgagggtgagggcaaggtagggactgggaggagacttctggttccctggttggtcctggtggggcctgactgggccagggttttcctgtgcaggtgcggggagtagggcggggtctctggttggcggggagggctccaggagcctgtcccagccctgggggtgtctggctgagccccacagaagggaactctgagatgggctttgcagcaggggaaagaaaagggaggtcgcgcatactggcttcctgaccatccaccaatggtggtggaacctggaagcctgagggaggaaggtgaggaggcgcttgagggaggggggaatctaggcgtcagggatgatagttcattgatccaagttactcagctatttcatagaaacggcaacagtaatgaataattataacacgtgccaagctctcctgatcactttacacaaatcatctcactgcatcttcacaacaaccttaactactattatcatcttcgcgttctggatgagagacctgaggccctgtagaggttaccagaaggcacacagctgagaagcgccagggccagggcaagggtcaggctgtgcactctggactctgtgttctgaccactgcgtcattgactctacagatgtctctgctttctgtgctcaccctgtcctcattccgcccccggcaggacagagggcccctgaagcatccatttgcccacagcgtcagtgaactgtgtagaactctctgtgcaagggagctggcccctgcgcaccctgagtcgtttttcttccctggctccccacgcaggggcagtgaacagaggagagggaagccttgttggaagagggcagtaaatcacagcatagctatccagactgcaattatttacttagtgcattcagggtcttgtgctaggtggtggggataccgcactgaaccagacagacaagggtcctgttcctgcctgccctcggggtgtgttttgggaattcctccttgagggtgctttggcattgaatgggcagaggtctggtgctggggggctgtcccacaccagcaagacttgtaatgtacatgaatgtgaatgtcatttcaggatagtaaaaggaggcctccaaaaatgtttcttattaaaagggagcattgggtctgagggttgggaaatgatatttccttaggtcaggcctgtcccaggaagcaaccctcagtcagggatacggaggaccatgaagatagtacggtgaggggaggaggaagatacagcaacgtaaattttgccatcttggcctcagtttggttttaaaggacagcagttggaccctccccatgcctaggtctcctgcatggattcagtcagtggtggcccaggtgtggaagacaccccccatgtcttattacctactctgggcttggggtgtggtgatcaggaccttgtagtcaatatcttcccaacaagaagcaaaataagaacaagatataaacaggaggtgattcatctggtgcccctaggggttggaggggaaggtgatggggtccatcctggttcttgggggttcctggtgtttgctgtattactgtgaagtaaattaacacttctgctgtgtgaactggcttgcattagaccaactctcctgctgagagcaaccagaaaagctggattaaagttcctgtttttgtttttgagtctatttgaaggcccaggagagcaaattatctttgaggtcatcacctcaccaagtactggcatccagtgcagaacagcaagagttgatgagaacatcagactagaagaacggagtgaaaaaaatttaaattttttttaaaaagagtttgtggatacatataaacgtaataaaccagctccaaattattgatgccagtcaatggagtaatcaaaaaatatgaatatgaaaagtgatactaaaatgattagtaaatcactatagtctataatgggaaaactcattctattagggactaaaataacaaaaatgtgctttaagtttttctttcttttttttttttcaagagccgacgtcttgttctgttgcccaggctagagtgcactgaggcaatcacagctcactgcagcctcgatttcctaggctcaagcaatcatcccgcctcagcctccccgactacaggcatatgccaccacacccagctaatttttaaaaaactttttgtagagatggggttttgctatgttgcccaggctggtctcaaactcctgggctcaagcgatccacctatcttggcctcccaaaatgctggattacaggggtgagccaccacgcccagcctgcttcaggtttttttgttttgttttgttttgttttttagagaaaaatatacattttacacttgtctgctacttagaaataagaacaggaaatatacaactttaaaaaattcattctcataccttggtaacgaaatatccacctttaaatgttaatttataaaacaaccagcacaaccagcaaggctgttgtggctcacacctgtaatcccagcactttgggaggtggaggagggcagaatgcttgagcccaggagattcagaccaggctgggcaacatagtgagaccccatctctacaaaaaatatgataattagcgaggcatggtggtgcacacctgtagtcccagctacttgagaggctaaggcaggaggatcccttgagcccaggaggtcgaggctgtattgagccgtgattgcaccactgcacttcagcctaggcagcagagtgagactttgtctcaaaaataaataaatagttaaataaaacaaccagcagctgctctgcctatggagtagtcattttttattcctttactttcttaatacatttgctttcactttattctatggacttgctccgaattctttcttgtgtgagatccaaaaaccctctcttgggtctggatcaggacccctttccggtaacatcttcctggtgaaccacgaagggatgatactgaggagaccctcgacccaaaggaaaaagactgcagcactgattggccaactttggactgaccctgcttattcctgtgaaccaatcagtgacctgtgacggctcctcagaagaaacaagagggatggacaacaccttttgttggagctcagttatgagtggctcagttatgactgagctcccttctaccctgaatacaagagaccctaataggcaggaatatcatcgcccctattcctcctgaagaagttacagaagatgaatcttcctccctctaaaccgttaggattaagggtttccttgtaaaagggaagggcaaatatgtcagaggcgtttgaaccagagtgattctatcttgaataggggctgggtaaaataaggctgagacctactgggctgctcctgggctactcccaggaggttaggcattctaagtcacaggatgagataggaggtcagcacaagatacaggtcacaaagatcttgctgataaaacaggttgcagtaaagaagctggctaaaagccaccaaaaccaagacagcaatgaaagtaacctctggtcttcctaactgctcattatacactaattatgatgcactagcatgctaagagacacttccaccagcgccatgacagtgccatggcaacatcaagaagtcaccccacatggtctaaaaaggggaagaaccttcagttcccggaattgcccacccctttcctggaaaactcatgaataatccaccccttgtttagcatataattaagaaataactgtaagtatccttagtccagcagcccaagctgctgctctgcctatggagtagccattctttattcctttactttcttaataaacttgctttcacattaaaaacaacaacaacaacaccaacaaccagcaaatatatcagaggcttagcatcccctattcaaggggacagttctggaggccgagaaagaagtagaaaggtggagaataaaagacacaaaggagcagaagaattttatcttggcctccatgtggcacctcacagcttgggaacaacaatttctctcataattttcctcagctccaccactcacaagctgtgtgacctcgggcaaggcacccaagctcctctgggcctcagcttcccagtcagtacaatggggtaacagtagtgcttacgttttttgtgtttttttttgagatggagtcttgctcttgtcacccaggctgaagtgcaatggcacgatctcggctcactgcaacctccgcctcccaggttcaagtgattctcctgcctcagcctcctgagtagctgggattacaggtgtgcaccaccacaccagggtaatttttgtatttttagtagagacggggtttcatcatgttggtcaggctggtctcgaactcctgacctcgtgatctggctgcctcggcctcccaaagtgctgggattacaggcgtaagccaccgcacccggccagtagtgcttactttgtggggtcatctgtgaatgtgaaatgagttaataaatggaaagcacttagaaaagcctctggaaccactgaatcaaattggatatcattactgaaccttcattcaatgcttcaatacccatttagtgtcatctgtccaaatgctggagatacgcctagcacacactgactgctcagtgagcagtgtcacaatgaacacgtgcaatggccttgaaggccacatcggggcttgccctgatcagcaggttggaggtgctccaggcccgaagcttagctgtgagtggggacacgggagggaggttggaactgccactgcagaaggggttctgaacctaggttcaggagagaggctttgaacctgcacgtgtgggaagccatggaagtttccaggaaggactgcaggtcccaactggagatgtgccgttcctccttcaggtacctgggaatgtcagtcacaccccagacctgctcagctcccccaaactgctgttcctgtatctgagagcttcaagtctccaaatggcctacctcatacatggggaaactgaggcctggggaggccggggactgagctagcattcacttgtggaaatagtctggcatcatctggagaagttagagacatgcaaaccctacagccctcagattcccgtctgagagtctgcatgcctatgtggaccaggagatgtgtgcgggagtgaacactgcagtgttgctcccaacagcaagaaccagaagcagcccaaagggctgttacaggagaatatggacacccaggctgcacatgcacaccatggaatgctgtatggcagtggaaataaatgaacagctaccactataggcaaacaggaatcacagcaacagccaagagtgaaggcgtggagggacgagaccatgcactcacacctggcctgcctggctcgcactccgggcaaaggggtcagaacagtgactggcacacacgttaagtgctatgtgagtgttaagataaaactaggatgtccagtggggagaaagcaagcctttgaagattatgtgcttttacaaacttcaagtgcaatgaaaactaaacaagatgttgttcaggcattcatatatgatataaagttcctttctttaaaaaagggatgggctgggcacggtggctcacgcctgtaattctaatactttgggaggccgaggcaggtggatcacgaggtcgagaaatcgagaccatcctggccaacatggtgaaaccctgtctctactaaaaatacaaaaaaattagctgggcgtggtggcgtgtgcctgtagtcccagctacttgggaggctgaggcaggagagtcacttgaacccgggaggcaaaggttgcagtgagccgagatcgtgccaccgcactccagcctggcgacagagtgagactccatctcaaaaaaaaaaagaaaaaaaaaagtatgacaagcagaaagtaatttgggagctgcggggaggcaagggtaagggatggggaagtggaccagaggcatatgcgtcattggcagtgtctaagcactcacgataggcgtggatcacaggggctcgctctgtaattaaaaggaaaagggtttttgttgtgttgttgttgttgctgtttttgagacaagggtcttgctctgtcatcatccaggctggagtgcagtggtgcagtctcagctcactgcaacctccgcctcctgggttcaagcgattctcctgcctcagcctcctgagcagctaggactacaggtgtgtgccaccatgcctggctaatttttgtattttttagtggaaatggggttttgccatgttgcccaggctcgtcttgaactcctgacctcaagtgatccactcgtctcggcctcccaaagtgctgggattacaggtgtgagctattgtccccagccaaaaggaaaagttttactgtagtaacccttccggactagggacctcgggcctcagcctcaggctacctaggtgctttagaaaggaggccacccaggcccatgactactccttgccacagggagccctgcacacagatgtgctaagctctcgctgccagccagagggaggagggtctgagccagtcagaaggagatgggccccagagagtaagaaagggggaggaggacccaagctgatccaaaaggtgggtctaagcagtcaagtggaggagggttccaatctgatggcggagggcccaagctcagcctaacgaggaggccaggcccaccaaggggcccctggaggacttgtttcccttgtcccttgtggttttttgcatttcctgttcccttgctgctcattgcggaagttcctcttcttaccctgcacccagagcctcgccagagaagacaagggcagaaagcaccatgagtgggggcccaatgggaggaaggcccgggggccgaggagcaccagcggttcagcagaacataccctccaccctcctccaggaccacgagaaccagcgactctttgagatgcttggacgaaaatgcttggtgagctggggatctcctgcccccgccccgtccccaccgtttcttcctcttcctctcctccttctctctcttcccctcctcccgctcctcctttccctctccatcatctcctctcctagaatttcccgtcataatccacccttcccaggaagatctcaatgtctacttgccttccctctggctgcagctcttcctttgggcccatgactgtcatgaggcaggaaggaccaggtctggctccaagaccttgtggctacccctgaccagactccactgacccctgctttcctctcccagacgctggccactgcagttgttcagctgtacctggcgctgccccctggagctgagcactggaccaaggagcattgtggggctgtgtgcttcgtgaaggataacccccagaagtcctacttcatccgcctttacggccttcaggtgacccccccacccccgactggacttgcaagccagttctcaacccgcaaacccagatctgtgtccatatgtgtccatagcttcaagacctcagacctgatcagtgaatccctgagccccagaaccaaagactcatccagatggcaaactctgacttgcctttctaagtctgcaatgactggccccagtctccgtatcaagatctctaaagcccccagtattagtctgctgcctaagcctaatcttttccacaaattccaataaatgagcactgtatttgtacctgaacctcaaatctattctaaactcaacattttgcatcccaggaatctctcatcaaaactcctgaaccccagatgtttgccaagctcctaagtcataaatctgttcaacaaaccccaaagttgaatattccattgatccttgaactccaaatctgtccttctaaatccacagcacagaccccagagttcccatattaaaattcctgaacactcaaataccgaggtagttcttaagcaaaaagtcttttccacaatcccctgacctgaactttctaggtttaagccccaaattcatccttttaaacccataaagatggacccagcataacttccagatcccaaggctatcaaatatccaccaaactcctaaaccataactctctccacaaaccccaaattgcacttactttagctggactccccgcgaaactcccaagtctatgtgtctgaacttcaaatctcaactccaacccccaaatactagaatcctacctgtcatgaattggggctggggtggtgggggagggcatggattgaatctgtgaatgagcctcaacttcctaagactagagtcctaaattatgaaattcaagcccccaagtcccagatctagggccccaaaccccaaatccaaacctctcacaaaagtgtatggctcccagactataccccacaatccacacccttagacaccaactctctggtgctgagctgaaaatctccaaaccagactatgaggctcccaaatccagacaccctgctccctgcccagctaacaaaagcctgccacccccggcgtgcctcagtgccactgtgcctcccaccctacacctctccaggctggtcggctgctctgggaacaggagctgtactcacagcttgtctactccacccccacccccttcttccacaccttcgctggagatgtaagtgatcaaccagccctcgggcctcacttggggtgtggagaggagatgggaaagttgcgggggacctgggaggcggctgaccccaaggtatgtgcaggactgccaagcggggctgaactttgcagacgaggacgaggcccaggccttccgggccctcgtgcaggagaagatacaaaaaaggaatcagaggcaaagtggaggtgaggaggccacaggggaggaaaggaagttgggcagaggtgagtgcaagcctggggaactagaaaagtcccctctcatggtcctggctcccaatccatctatccacagacagacgccagctacccccaccaccaacaccagccaatgaaggtgagtcctctagtgcaagtaggggtaataaggggctagcccaggaacctgtggcagggctgtgataactctctacacattccatcttcccagagagaagaggagggctcccacccctgcccctgcatccaggtggagaccaaggaggtgcgtgctgattcttccctgtgtctctggatggatgggtaagagtggatggaggaatgaggagttggatgggtgcgtaagtgggtgaatggataggtagattgataggtatgtggatggacgagcaggtgcatggatgtgtggactgatggatgggtggatggattggcggtagatggctgagtagagggatgaattgatgggaggatgaaagtctaagtagatagatgcataggtgaatgggtatgtggataaatgaatgaaaaggtagatggatgactgagtaaattaatcaatgagtgaatgaatgaacagtgaataaatgactaaatgacaagtttcagtcagtgaagaaagcatgattgaatgaataaatgagtaaatgaatattttaacaaattcattagtcaatgagccagtgaatgataaagcatgagggaatgaaaacatgaatgaatcagtgaatgtatgaatggtttgtgggatccacccacttctccatagaccctacttgaacccttcacccactacctccatgaccatccaacacacacacagatttccctcaaggcttccgtttcttgcccctgtgctttggttggttggtaagtgggtcaatgagccaaccaccctattttccccacaggccctccagtgggtccgctctccctggggctggcgacagtggacatccagaaccctgacatcacgagttcacgataccgtgggctcccagcacctggacctagcccagctgataagaaacgctcagggaagaagaagatcagcaaagctgatattggtgcacccagtggattcaagtgagagccactccccagtggacccacagattcctgggggcagaggggcacatgaacaagtggacagctgagtgaatggaaggatgggcagatgggcagatggctgggtggctgagtgggtaaatgggtggttggataggtaggtgcagggctgggtctagggagaggtaaataaggcaccaagggtacaaaatttaaggaggcactcactctcagaggcatgcaactgtaattcctgactctcagagtgagtgactcacttaaattttgcaccctaggcaccttacttgcctcaccctgggcccactctgggtgggctgttaggagagcaggtgggtgggcaggtgaacaaatggatagatagatgaggtagatgatggatgagaagggctggtgggtaggtgggtgagtggatgggtggatggatggataaatgaatggatgaatgaatgggttgaagaatgaatggataagtggttggatggacaagtttatgggtggatgggttgatgggaggtgcgtggatagatagatgggtgagtggataggtgtgtggacagattgatatgcaggctgattggctcacagacaaggtggatggggatggacaggtggacagatacgtggatgaatggacagttcaatggataagtgaacagaagtgtgtggttgcatgggtagaaaaatgagtggatggatagatggaaaggtgggcacatgggtaggtggatgggtggatggacaagtgtgtgtgaggacagactggtggacaaatgggtgaacagacatatgtgggcagatagttgcagagacagatgtatggacagatcagtagtccaacagatgaatgtgaatgaataggtggacaaatgcatgggatagatggggaaagagggatgggtggatggatcagcaccacaaactatggagcccttctaattccataactcctgcctatactcattcactcattcagtctcattcattaattctggcccctcagagtctctttgggcaggagagggcaagagggtttcactatgaagggagggaaggaagggcagtgaggattcactggagtctcttcacctctcccaggcatgtcagccacgtggggtgggacccccagaatggatttgacgtgagtaacttcagagtctcttggactccactaaacttccacccacccttccaaagaccactgctgagaccccacccccagatcgtgcccttcccacacccctctcagatcccttgctgggatggacccaacgacaatccatgtcgcttgtctcctcgccttattcctctactcctgcccctggcctttttcctcctgggcaggtgaacaacctcgacccagatctgcggagtctgttctccagggcaggaatcagcgaggcccagctcaccgacgccgagacctctaaacttatctacgacttcattgaggaccagggtgggctggaggctgtgcggcaggagatgaggcgccagggtgagaccctgcttccatacgctcccttctctagcccaagcagctcatagctaagatacgcactaagtcactcagtccttatgggagcacctatactgcttcagtcaggagttggtcagtgggggtacccattttacaaatgagcaaaactgaggctcagaagaaatcaatgagagttacagctatgtgttataccccctccacagagccacttccgccgcccccaccgccatctcgaggagggaaccagctcccccggccccctattgtggggggtaacaagggtcgttctggtccactgccccctgtacctttggggattgccccacccccaccaacaccccggggacccccacccccaggccgagggggccctccaccaccaccccctccagctactggacgttctggaccactgccccctccaccccctggagctggtgggccacccatgccaccaccaccgccaccaccgccaccgccgcccagctccgggaatggaccagcccctcccccactccctcctgctctggtgcctgccgggggcctggcccctggtgggggtcggggagcgcttttggatcaaatccggcagggaattcagctgaacaaggtgaggacaggcaggatggaggattgggggtctaggactctggggtgtcccgtctaagtcaggatactggggggctgaggccaggactgaggagagtgccaggccttagggattcagtgatagggttgaaaggttggtgggaagccttgaaggggactggagtgtgtgggagagaaaatattgatggaggggcggggagaaatgctcctttcccaggccctaagccctctgtgctgatccctgcctgctgcagacccctggggccccagagagctcagcgctgcagccaccacctcagagctcagagggactggtgggggccctgatgcacgtgatgcagaagagaagcagagccatccactcctccggtgagctgatcctgccggggcctcaaacctggctcccagggctagcactggcctcaaaacaatcccagcagtcaccaccaatagtgacatcagccccatctgtttgacagcattaacatgaatcttgtgtcagcctcgtttttgacaatgttaacattaagtcattatgtgacaataatataattaactccaactttgacagtaatattaacattaatgccagggtgtgtccacaatattaatgtcattcccacatgttcagtactattaacatcagctggccggcgcggtggctcatgcctgtaatccaggaactttgggaggctaaggcaggaggatcacttgagcccaggagttcgagaccagcctgggcaatatagtgagacctcgtttccataaaaactaaattcaaaaaaagtagtcaagcatagtggtgtgtgcctgtggtcccagctacttgggaggctgaggtgggaggattgcttgaccctgggaggtcaaggcagcagtgatccatgattgtgccactgcactccagcctgggtgacagagatcctatctcaaaaaaaaaaaaaattaacccattatgtgatgacaatattatgaagaacactattgttgacaatattaattttaattccatgtattaacagatttacattaattcattatgacgtaacctaatctaatcttttaaaaaatttttttgaaacagggtctcgctctgtgtcccaggctggagtacagtggtgcaatcatggctcagtgcagcctcaacctcccaggctcaagcgatcctcccgcctcagctcccaaagtagctgggactacaggcgtgtgccaccatacctggctaatttttggtgtttttttggtagtgatgagctctcactaccaagctctcactactctcatgttgcccaggctgctctgcaactccagggctcaagcgatctgccccgcctcagcctcccagagtgctgggattacaggcatgagccaccaggcctggctgttaacctaatctttttataataatgttactattactctcttaatctgtcagcaatactgtcactaatccattatatgatgcaaatattagtatcaacctactataggaacttcatctttcgacaatgattttttttttcttttgagacggagtcttgctctgtcacccaggctggagtgcagtggcgcgatcttggctaactgcagactctgcctcctgggttcaagcgattctcctgcctcagccttccgagtagctgggactacaggcacgccactacgcccagctaattttgatgttattgtcattaaccccattatgtgtcaaaaatattagcgttaaccagacaggaagcaataatatattatcacacctttgctaatattatttaaattcaccctattatgtgataaataggttaacattaaccctttgtttgacaatatctcgactaaccacatttttgacagcataaacttcaactccaactagaactcagaccccaactataatccctttcttgtcccaaatggaaactctaacttgccctcctctagcatgagacctcagaaccccagggtccagtcctcacctcccaggccctatgaagccccccaccaacctcccagggcatcttatctttctctttccctccagacgaaggggaggaccaggctggcgatgaagatgaagatgatgaatgggatgactgagtggctgagttacttgctgccctgtgctcctccccgcaggacatggctccccctccacctgctctgtgcccaccctccactctcctcttccaggcccccaaccccccatttcttccccaccaacccctccaatgctgttatccctgcctggtcctcacactcacccaacaatcccaaggccctttttatacaaaaattctcagttctcttcactcaaggatttttaaagaaaaataaaagaattgtctttctgtctctctataaa

SEQ ID NO: 5267 - RNA, 20 nt, Artificial Sequence
  Synthetic construct
gccaagagtgaaggcgtgga

SEQ ID NO: 5268 - RNA, 20 nt, Artificial Sequence
  Synthetic construct
aaagtaatttgggagctgcg

SEQ ID NO: 5269 - RNA, 20 nt, Artificial Sequence
  Synthetic construct
ggggtgtgactgacattccc

SEQ ID NO: 5270 - RNA, 20 nt, Artificial Sequence
  Synthetic construct
ggccagtagtgcttactttg

SEQ ID NO: 5271 - RNA, 20 nt, Artificial Sequence
  Synthetic construct
aacacgtgcaatggccttga

SEQ ID NO: 5272 - RNA, 20 nt, Artificial Sequence
  Synthetic construct
ggaacggcacatctccagtt

SEQ ID NO: 5273 - RNA, 20 nt, Artificial Sequence
  Synthetic construct
taaaactaggatgtccagtg

SEQ ID NO: 5274 - RNA, 20 nt, Artificial Sequence
  Synthetic construct
ctgagcagtcagtgtgtgct

SEQ ID NO: 5275 - RNA, 20 nt, Artificial Sequence
  Synthetic construct
ccagtagtgcttactttgtg

SEQ ID NO: 5276 - RNA, 20 nt, Artificial Sequence
  Synthetic construct
ggtattgaagcattgaatga

SEQ ID NO: 5277 - RNA, 20 nt, Artificial Sequence
  Synthetic construct
ctttaaaaaagggatgggct

SEQ ID NO: 5278 - RNA, 20 nt, Artificial Sequence
  Synthetic construct
tgacattcccaggtacctga

SEQ ID NO: 5279 - RNA, 20 nt, Artificial Sequence
  Synthetic construct
acacatctcctggtccacat

SEQ ID NO: 5280 - RNA, 20 nt, Artificial Sequence
  Synthetic construct
acgggaatctgagggctgta

SEQ ID NO: 5281 - RNA, 20 nt, Artificial Sequence
  Synthetic construct
ggcctgcctggctcgcactc

SEQ ID NO: 5282 - RNA, 20 nt, Artificial Sequence
  Synthetic construct
ttggaactgccactgcagaa

SEQ ID NO: 5283 - RNA, 20 nt, Artificial Sequence
  Synthetic construct
gactctcagacgggaatctg

SEQ ID NO: 5284 - RNA, 20 nt, Artificial Sequence
  Synthetic construct
tgagagtctgcatgcctatg

SEQ ID NO: 5285 - RNA, 20 nt, Artificial Sequence
  Synthetic construct
ctgcggggaggcaagggtaa

SEQ ID NO: 5286 - RNA, 20 nt, Artificial Sequence
  Synthetic construct
gtccttcctggaaacttcca

SEQ ID NO: 5287 - RNA, 20 nt, Artificial Sequence
  Synthetic construct
tgccctgatcagcaggttgg

SEQ ID NO: 5288 - RNA, 20 nt, Artificial Sequence
  Synthetic construct
cagatacaggaacagcagtt

SEQ ID NO: 5289 - RNA, 20 nt, Artificial Sequence
  Synthetic construct
cccgaagcttagctgtgagt

SEQ ID NO: 5290 - RNA, 20 nt, Artificial Sequence
  Synthetic construct
gccagtagtgcttactttgt

SEQ ID NO: 5291 - RNA, 20 nt, Artificial Sequence
  Synthetic construct
ttggacagatgacactaaat

SEQ ID NO: 5292 - RNA, 20 nt, Artificial Sequence
  Synthetic construct
acgataggcgtggatcacag

SEQ ID NO: 5293 - RNA, 20 nt, Artificial Sequence
  Synthetic construct
acagcaacagccaagagtga

SEQ ID NO: 5294 - RNA, 20 nt, Artificial Sequence
  Synthetic construct
aaaggggtcagaacagtgac

SEQ ID NO: 5295 - RNA, 20 nt, Artificial Sequence
  Synthetic construct
gatacaggaacagcagtttg

SEQ ID NO: 5296 - RNA, 20 nt, Artificial Sequence
  Synthetic construct
gcccgaagcttagctgtgag

SEQ ID NO: 5297 - RNA, 20 nt, Artificial Sequence
  Synthetic construct
gggggagctgagcaggtctg

SEQ ID NO: 5298 - RNA, 20 nt, Artificial Sequence
  Synthetic construct
gaaggactgcaggtcccaac

SEQ ID NO: 5299 - RNA, 20 nt, Artificial Sequence
  Synthetic construct
aggcatgcagactctcagac

SEQ ID NO: 5300 - RNA, 20 nt, Artificial Sequence
  Synthetic construct
gtggaccaggagatgtgtgc

SEQ ID NO: 5301 - RNA, 20 nt, Artificial Sequence
  Synthetic construct
agaaccagaagcagcccaaa

SEQ ID NO: 5302 - RNA, 20 nt, Artificial Sequence
  Synthetic construct
cctcagtttccccatgtatg

SEQ ID NO: 5303 - RNA, 20 nt, Artificial Sequence
  Synthetic construct
gacttgaagctctcagatac

SEQ ID NO: 5304 - RNA, 20 nt, Artificial Sequence
  Synthetic construct
gcaggccaggtgtgagtgca

SEQ ID NO: 5305 - RNA, 20 nt, Artificial Sequence
  Synthetic construct
gggaggcaagggtaagggat

SEQ ID NO: 5306 - RNA, 20 nt, Artificial Sequence
  Synthetic construct
gtgaatgctagctcagtccc

SEQ ID NO: 5307 - RNA, 20 nt, Artificial Sequence
  Synthetic construct
tggctcgcactccgggcaaa

SEQ ID NO: 5308 - RNA, 20 nt, Artificial Sequence
  Synthetic construct
gtgagtgttaagataaaact

SEQ ID NO: 5309 - RNA, 20 nt, Artificial Sequence
  Synthetic construct
atttgattcagtggttccag

SEQ ID NO: 5310 - RNA, 20 nt, Artificial Sequence
  Synthetic construct
cacctccaacctgctgatca

SEQ ID NO: 5311 - RNA, 20 nt, Artificial Sequence
  Synthetic construct
tgcttctggttcttgctgtt

SEQ ID NO: 5312 - RNA, 20 nt, Artificial Sequence
  Synthetic construct
aacagccaagagtgaaggcg

SEQ ID NO: 5313 - RNA, 20 nt, Artificial Sequence
  Synthetic construct
gctgcggggaggcaagggta

SEQ ID NO: 5314 - RNA, 20 nt, Artificial Sequence
  Synthetic construct
ggaaatagtctggcatcatc

SEQ ID NO: 5315 - RNA, 20 nt, Artificial Sequence
  Synthetic construct
tggaactgccactgcagaag

SEQ ID NO: 5316 - RNA, 20 nt, Artificial Sequence
  Synthetic construct
ggctcgcactccgggcaaag

SEQ ID NO: 5317 - RNA, 20 nt, Artificial Sequence
  Synthetic construct
ataaaactaggatgtccagt

SEQ ID NO: 5318 - RNA, 20 nt, Artificial Sequence
  Synthetic construct
gagagcttcaagtctccaaa

SEQ ID NO: 5319 - RNA, 20 nt, Artificial Sequence
  Synthetic construct
cagcaggttggaggtgctcc

SEQ ID NO: 5320 - RNA, 20 nt, Artificial Sequence
  Synthetic construct
gggaagccatggaagtttcc

SEQ ID NO: 5321 - RNA, 20 nt, Artificial Sequence
  Synthetic construct
atacaggaacagcagtttgg

SEQ ID NO: 5322 - RNA, 20 nt, Artificial Sequence
  Synthetic construct
agccatggaagtttccagga

SEQ ID NO: 5323 - RNA, 20 nt, Artificial Sequence
  Synthetic construct
ttgggacctgcagtccttcc

SEQ ID NO: 5324 - RNA, 20 nt, Artificial Sequence
  Synthetic construct
gtcttgctctgtcatcatcc

SEQ ID NO: 5325 - RNA, 20 nt, Artificial Sequence
  Synthetic construct
gataaaactaggatgtccag

SEQ ID NO: 5326 - RNA, 20 nt, Artificial Sequence
  Synthetic construct
ctggaaccactgaatcaaat

SEQ ID NO: 5327 - RNA, 20 nt, Artificial Sequence
  Synthetic construct
cctgcacgtgtgggaagcca

SEQ ID NO: 5328 - RNA, 20 nt, Artificial Sequence
  Synthetic construct
atgtgaaatgagttaataaa

SEQ ID NO: 5329 - RNA, 20 nt, Artificial Sequence
  Synthetic construct
gctgtgagtggggacacggg

SEQ ID NO: 5330 - RNA, 20 nt, Artificial Sequence
  Synthetic construct
agccaagagtgaaggcgtgg

SEQ ID NO: 5331 - RNA, 20 nt, Artificial Sequence
  Synthetic construct
cctttctttaaaaaagggat

SEQ ID NO: 5332 - RNA, 20 nt, Artificial Sequence
  Synthetic construct
agaaagtaatttgggagctg

SEQ ID NO: 5333 - RNA, 20 nt, Artificial Sequence
  Synthetic construct
cgagaccatgcactcacacc

SEQ ID NO: 5334 - RNA, 20 nt, Artificial Sequence
  Synthetic construct
taaaagcacataatcttcaa

SEQ ID NO: 5335 - RNA, 20 nt, Artificial Sequence
  Synthetic construct
tttggacagatgacactaaa

SEQ ID NO: 5336 - RNA, 20 nt, Artificial Sequence
  Synthetic construct
caaatggcctacctcataca

SEQ ID NO: 5337 - RNA, 20 nt, Artificial Sequence
  Synthetic construct
ctggctcgcactccgggcaa

SEQ ID NO: 5338 - RNA, 20 nt, Artificial Sequence
  Synthetic construct
aggaacggcacatctccagt

SEQ ID NO: 5339 - RNA, 20 nt, Artificial Sequence
  Synthetic construct
ggctttgaacctgcacgtgt

SEQ ID NO: 5340 - RNA, 20 nt, Artificial Sequence
  Synthetic construct
tgattcctgtttgcctatag

SEQ ID NO: 5341 - RNA, 20 nt, Artificial Sequence
  Synthetic construct
tgacaagcagaaagtaattt

SEQ ID NO: 5342 - RNA, 20 nt, Artificial Sequence
  Synthetic construct
agtgtcatctgtccaaatgc

SEQ ID NO: 5343 - RNA, 20 nt, Artificial Sequence
  Synthetic construct
aagaaccagaagcagcccaa

SEQ ID NO: 5344 - RNA, 20 nt, Artificial Sequence
  Synthetic construct
gggctcgctctgtaattaaa

SEQ ID NO: 5345 - RNA, 20 nt, Artificial Sequence
  Synthetic construct
gcagaaggggttctgaacct

SEQ ID NO: 5346 - RNA, 20 nt, Artificial Sequence
  Synthetic construct
gttcagaaccccttctgcag

SEQ ID NO: 5347 - RNA, 20 nt, Artificial Sequence
  Synthetic construct
attcacttgtggaaatagtc

SEQ ID NO: 5348 - RNA, 20 nt, Artificial Sequence
  Synthetic construct
aaagcctctctcctgaacct

SEQ ID NO: 5349 - RNA, 20 nt, Artificial Sequence
  Synthetic construct
tccctccacgccttcactct

SEQ ID NO: 5350 - RNA, 20 nt, Artificial Sequence
  Synthetic construct
aactaaacaagatgttgttc

SEQ ID NO: 5351 - RNA, 20 nt, Artificial Sequence
  Synthetic construct
attctcctgtaacagccctt

SEQ ID NO: 5352 - RNA, 20 nt, Artificial Sequence
  Synthetic construct
ccaggtacctgaaggaggaa

SEQ ID NO: 5353 - RNA, 20 nt, Artificial Sequence
  Synthetic construct
aaagcacttagaaaagcctc

SEQ ID NO: 5354 - RNA, 20 nt, Artificial Sequence
  Synthetic construct
ccccactcacagctaagctt

SEQ ID NO: 5355 - RNA, 20 nt, Artificial Sequence
  Synthetic construct
agatacaggaacagcagttt

SEQ ID NO: 5356 - RNA, 20 nt, Artificial Sequence
  Synthetic construct
cccactcacagctaagcttc

SEQ ID NO: 5357 - RNA, 20 nt, Artificial Sequence
  Synthetic construct
gtcacaatgaacacgtgcaa

SEQ ID NO: 5358 - RNA, 20 nt, Artificial Sequence
  Synthetic construct
ctaagcactcacgataggcg

SEQ ID NO: 5359 - RNA, 20 nt, Artificial Sequence
  Synthetic construct
cacgataggcgtggatcaca

SEQ ID NO: 5360 - RNA, 20 nt, Artificial Sequence
  Synthetic construct
ttagctgtgagtggggacac

SEQ ID NO: 5361 - RNA, 20 nt, Artificial Sequence
  Synthetic construct
aaggcttgctttctccccac

SEQ ID NO: 5362 - RNA, 20 nt, Artificial Sequence
  Synthetic construct
cattcccaggtacctgaagg

SEQ ID NO: 5363 - RNA, 20 nt, Artificial Sequence
  Synthetic construct
cctcatacatggggaaactg

SEQ ID NO: 5364 - RNA, 20 nt, Artificial Sequence
  Synthetic construct
gccaatgacgcatatgcctc

SEQ ID NO: 5365 - RNA, 20 nt, Artificial Sequence
  Synthetic construct
ccccacaaagtaagcactac

SEQ ID NO: 5366 - RNA, 20 nt, Artificial Sequence
  Synthetic construct
aagtttccaggaaggactgc

SEQ ID NO: 5367 - RNA, 20 nt, Artificial Sequence
  Synthetic construct
tgctctgtcatcatccaggc

SEQ ID NO: 5368 - RNA, 20 nt, Artificial Sequence
  Synthetic construct
ctaggcgtatctccagcatt

SEQ ID NO: 5369 - RNA, 20 nt, Artificial Sequence
  Synthetic construct
gcttgccctgatcagcaggt

SEQ ID NO: 5370 - RNA, 20 nt, Artificial Sequence
  Synthetic construct
gttggaactgccactgcaga

SEQ ID NO: 5371 - RNA, 20 nt, Artificial Sequence
  Synthetic construct
gctcagtccccggcctcccc

SEQ ID NO: 5372 - RNA, 20 nt, Artificial Sequence
  Synthetic construct
actgagctagcattcacttg

SEQ ID NO: 5373 - RNA, 20 nt, Artificial Sequence
  Synthetic construct
ccgaagcttagctgtgagtg

SEQ ID NO: 5374 - RNA, 20 nt, Artificial Sequence
  Synthetic construct
gcctgcctggctcgcactcc

SEQ ID NO: 5375 - RNA, 20 nt, Artificial Sequence
  Synthetic construct
ggggttctgaacctaggttc

SEQ ID NO: 5376 - RNA, 20 nt, Artificial Sequence
  Synthetic construct
gcacctccaacctgctgatc

SEQ ID NO: 5377 - RNA, 20 nt, Artificial Sequence
  Synthetic construct
ttgggagctgcggggaggca

SEQ ID NO: 5378 - RNA, 20 nt, Artificial Sequence
  Synthetic construct
actgttctgacccctttgcc

SEQ ID NO: 5379 - RNA, 20 nt, Artificial Sequence
  Synthetic construct
gcccggagtgcgagccaggc

SEQ ID NO: 5380 - RNA, 20 nt, Artificial Sequence
  Synthetic construct
agtttccccatgtatgaggt

SEQ ID NO: 5381 - RNA, 20 nt, Artificial Sequence
  Synthetic construct
gagtgcgagccaggcaggcc

SEQ ID NO: 5382 - RNA, 20 nt, Artificial Sequence
  Synthetic construct
cgttcctccttcaggtacct

SEQ ID NO: 5383 - RNA, 20 nt, Artificial Sequence
  Synthetic construct
aaatggcctacctcatacat

SEQ ID NO: 5384 - RNA, 20 nt, Artificial Sequence
  Synthetic construct
accagaggcatatgcgtcat

SEQ ID NO: 5385 - RNA, 20 nt, Artificial Sequence
  Synthetic construct
tctgcatgcctatgtggacc

SEQ ID NO: 5386 - RNA, 20 nt, Artificial Sequence
  Synthetic construct
catgtatgaggtaggccatt

SEQ ID NO: 5387 - RNA, 20 nt, Artificial Sequence
  Synthetic construct
cttagctgtgagtggggaca

SEQ ID NO: 5388 - RNA, 20 nt, Artificial Sequence
  Synthetic construct
gacgggaatctgagggctgt

SEQ ID NO: 5389 - RNA, 20 nt, Artificial Sequence
  Synthetic construct
tgggggagctgagcaggtct

SEQ ID NO: 5390 - RNA, 20 nt, Artificial Sequence
  Synthetic construct
ccatggcttcccacacgtgc

SEQ ID NO: 5391 - RNA, 20 nt, Artificial Sequence
  Synthetic construct
tgaacctaggttcaggagag

SEQ ID NO: 5392 - RNA, 20 nt, Artificial Sequence
  Synthetic construct
catggtgtgcatgtgcagcc

SEQ ID NO: 5393 - RNA, 20 nt, Artificial Sequence
  Synthetic construct
ggaggcaagggtaagggatg

SEQ ID NO: 5394 - RNA, 20 nt, Artificial Sequence
  Synthetic construct
taggcatgcagactctcaga

SEQ ID NO: 5395 - RNA, 20 nt, Artificial Sequence
  Synthetic construct
gatcagggcaagccccgatg

SEQ ID NO: 5396 - RNA, 20 nt, Artificial Sequence
  Synthetic construct
acaaagtaagcactactggc

SEQ ID NO: 5397 - RNA, 20 nt, Artificial Sequence
  Synthetic construct
ccgttcctccttcaggtacc

SEQ ID NO: 5398 - RNA, 20 nt, Artificial Sequence
  Synthetic construct
ctgtgagtggggacacggga

SEQ ID NO: 5399 - RNA, 20 nt, Artificial Sequence
  Synthetic construct
gctctgtaattaaaaggaaa

SEQ ID NO: 5400 - RNA, 20 nt, Artificial Sequence
  Synthetic construct
tgatatccaatttgattcag

SEQ ID NO: 5401 - RNA, 20 nt, Artificial Sequence
  Synthetic construct
tcactcccgcacacatctcc

SEQ ID NO: 5402 - RNA, 20 nt, Artificial Sequence
  Synthetic construct
gcagtttgggggagctgagc

SEQ ID NO: 5403 - RNA, 20 nt, Artificial Sequence
  Synthetic construct
gggatggggaagtggaccag

SEQ ID NO: 5404 - RNA, 20 nt, Artificial Sequence
  Synthetic construct
tcacagctaagcttcgggcc

SEQ ID NO: 5405 - RNA, 20 nt, Artificial Sequence
  Synthetic construct
aatggcctacctcatacatg

SEQ ID NO: 5406 - RNA, 20 nt, Artificial Sequence
  Synthetic construct
agtgtctaagcactcacgat

SEQ ID NO: 5407 - RNA, 20 nt, Artificial Sequence
  Synthetic construct
ttgggggagctgagcaggtc

SEQ ID NO: 5408 - RNA, 20 nt, Artificial Sequence
  Synthetic construct
ctgcttctggttcttgctgt

SEQ ID NO: 5409 - RNA, 20 nt, Artificial Sequence
  Synthetic construct
tcacgataggcgtggatcac

SEQ ID NO: 5410 - RNA, 20 nt, Artificial Sequence
  Synthetic construct
agatgtgccgttcctccttc

SEQ ID NO: 5411 - RNA, 20 nt, Artificial Sequence
  Synthetic construct
gaactcctgacctcgtgatc

SEQ ID NO: 5412 - RNA, 20 nt, Artificial Sequence
  Snythetic construct
gcactcacacctggcctgcc

SEQ ID NO: 5413 - RNA, 20 nt, Artificial Sequence
  Synthetic construct
aagggtaagggatggggaag

SEQ ID NO: 5414 - RNA, 20 nt, Artificial Sequence
  Synthetic construct
ctctgtaattaaaaggaaaa

SEQ ID NO: 5415 - RNA, 20 nt, Artificial Sequence
  Synthetic construct
tgagtggggacacgggaggg

SEQ ID NO: 5416 - RNA, 20 nt, Artificial Sequence
  Synthetic construct
aatggccttgaaggccacat

SEQ ID NO: 5417 - RNA, 20 nt, Artificial Sequence
  Synthetic construct
cccatcccttttttaaagaa

SEQ ID NO: 5418 - RNA, 20 nt, Artificial Sequence
  Synthetic construct
aggctttgaacctgcacgtg

SEQ ID NO: 5419 - RNA, 20 nt, Artificial Sequence
  Synthetic construct
aagccccgatgtggccttca

SEQ ID NO: 5420 - RNA, 20 nt, Artificial Sequence
  Synthetic construct
aggtgtgcaccaccacacca

SEQ ID NO: 5421 - RNA, 20 nt, Artificial Sequence
  Synthetic construct
gcagcccaaagggctgttac

SEQ ID NO: 5422 - RNA, 20 nt, Artificial Sequence
  Synthetic construct
caaagtaagcactactggcc

SEQ ID NO: 5423 - RNA, 20 nt, Artificial Sequence
  Synthetic construct
ctttgcccggagtgcgagcc

SEQ ID NO: 5424 - RNA, 20 nt, Artificial Sequence
  Synthetic construct
tctttaaaaaagggatgggc

SEQ ID NO: 5425 - RNA, 20 nt, Artificial Sequence
  Synthetic construct
tggccttgaaggccacatcg

SEQ ID NO: 5426 - RNA, 20 nt, Artificial Sequence
  Synthetic construct
ggggaaactgaggcctgggg

SEQ ID NO: 5427 - RNA, 20 nt, Artificial Sequence
  Synthetic construct
cggggcttgccctgatcagc

SEQ ID NO: 5428 - RNA, 20 nt, Artificial Sequence
  Synthetic construct
actgaggcctggggaggccg

SEQ ID NO: 5429 - RNA, 20 nt, Artificial Sequence
  Synthetic construct
taagcactactggccgggtg

SEQ ID NO: 5430 - RNA, 20 nt, Artificial Sequence
  Synthetic construct
tgtggaccaggagatgtgtg

SEQ ID NO: 5431 - RNA, 20 nt, Artificial Sequence
  Synthetic construct
tggggacacgggagggaggt

SEQ ID NO: 5432 - RNA, 20 nt, Artificial Sequence
  Synthetic construct
aactgaggcctggggaggcc

SEQ ID NO: 5433 - RNA, 20 nt, Artificial Sequence
  Synthetic construct
atggccttgaaggccacatc

SEQ ID NO: 5434 - RNA, 20 nt, Artificial Sequence
  Synthetic construct
aagttcctttctttaaaaaa

SEQ ID NO: 5435 - RNA, 20 nt, Artificial Sequence
  Synthetic construct
gtaatttgggagctgcgggg

SEQ ID NO: 5436 - RNA, 20 nt, Artificial Sequence
  Synthetic construct
tgttgctgtttttgagacaa

SEQ ID NO: 5437 - RNA, 20 nt, Artificial Sequence
  Synthetic construct
atggtgtgcatgtgcagcct

SEQ ID NO: 5438 - RNA, 20 nt, Artificial Sequence
  Synthetic construct
tcctttctttaaaaaaggga

SEQ ID NO: 5439 - RNA, 20 nt, Artificial Sequence
  Synthetic construct
gaaagtaatttgggagctgc

SEQ ID NO: 5440 - RNA, 20 nt, Artificial Sequence
  Synthetic construct
aaagttcctttctttaaaaa

SEQ ID NO: 5441 - RNA, 20 nt, Artificial Sequence
  Synthetic construct
atgacaagcagaaagtaatt

SEQ ID NO: 5442 - RNA, 20 nt, Artificial Sequence
  Synthetic construct
aaactgaggcctggggaggc

SEQ ID NO: 5443 - RNA, 20 nt, Artificial Sequence
  Synthetic construct
acagccctttgggctgcttc

SEQ ID NO: 5444 - RNA, 20 nt, Artificial Sequence
  Synthetic construct
ttctcctgtaacagcccttt

SEQ ID NO: 5445 - RNA, 20 nt, Artificial Sequence
  Synthetic construct
actctcagacgggaatctga

SEQ ID NO: 5446 - RNA, 20 nt, Artificial Sequence
  Synthetic construct
agggctgttacaggagaata

SEQ ID NO: 5447 - RNA, 20 nt, Artificial Sequence
  Synthetic construct
acaggagaatatggacaccc

SEQ ID NO: 5448 - RNA, 20 nt, Artificial Sequence
  Synthetic construct
caggctgcacatgcacacca

SEQ ID NO: 5449 - RNA, 20 nt, Artificial Sequence
  Synthetic construct
cactgccatacagcattcca

SEQ ID NO: 5450 - RNA, 20 nt, Artificial Sequence
  Synthetic construct
gcacaccatggaatgctgta

SEQ ID NO: 5451 - RNA, 20 nt, Artificial Sequence
  Synthetic construct
catggaatgctgtatggcag

SEQ ID NO: 5452 - RNA, 20 nt, Artificial Sequence
  Synthetic construct
aaatgaacagctaccactat

SEQ ID NO: 5453 - RNA, 20 nt, Artificial Sequence
  Synthetic construct
agctaccactataggcaaac

SEQ ID NO: 5454 - RNA, 20 nt, Artificial Sequence
  Synthetic construct
tgggagctgcggggaggcaa
